United States Patent Application Publication US 2026/0191916 A1 - sequence listing, part 50

SEQ ID NO: 215 - DNA, 2226447 bp, Streptococcus gallolyticus
  source 1..2226447: mol_type = genomic DNA
catattttagcatatcctcatttctcgacaaaataattcccttaaaaatagcgaattttctgataaaacaacataaaaaaatacctgagactactcgtctcaggtattctattattaatctcctaaaccgatacgggtaaagatttcatcaacacgtttagtgtagtatgatggattgaacaattcatcgatttcttcttgtgttaaacgtgaagtgacttcttcatcagcttcaagaagtggtttgaagtcaacttggttatcccaagaataagctgtcttaggttgaacaaggtcataagcttgttcacgtgtcattcctttttcaatcaatttaagcattacacgttggctgaaaataagaccaaaagtagaccccatgttgcgaatcatgttttctgggaaaacagtcaaatttttcacgatatttccaaaacggttaagcatgtaatcaataaggattgtagtatctggtgagataatacgttcagcagatgagtgagagatatcacgttcatgccaaagtgacacgttttcgtaagctgttaccatatgaccacgaataacacgtgcaagacctgtcatattttctgaaccgattgggttgcgtttgtgaggcatagctgagctacctttttgccccttagcgaagaattcttcaacttcacgttgttcagatttttgcagaccacggatttcagttgccatacgttcaattgatgttgcaatgctagcaagaactgcaaagtattctgcatgaaggtcacgtggaagaacttgtgttgaaatttcttgtgcacgaataccaagtttttcacacacataagcttcaacaaatggtggaatgttagcgaagttaccaacagcacctgagattttaccagcttcaacaccagcagcagcgtgttcaaaacgttcgatgttacgtttcatttcactgtaccaagttgccaatttcaaaccaaaggtagttggctcagcatggacaccgtgagtacgtcccatcatgattgtaaatttatgttctttagctttgttagcaatgatttcaaggaaattatgcaaatctttgcggatgatttcattagcttgtttgtaaaggtaaccataagctgtatcaacaacgtcagttgatgtcaagccatagtgcacccatttacgttcttgcccaagactttcagaaactgcacgagtgaatgccacaacgtcgtgacgtgtttgttgttcaatttccaaaatacggtcaacgtcaaagcttgcattggcacggattttagcgacgtcctctttaggaatttctcccaattcagcccaggcttcgtcagccaaaatttcaacttcaagccaagctttgtatttgttttcttcactccaaattgccgccatctcagggcgtgaataacgatcgatcatgtttaagatattaagggcattaagcgaatacggttaacaccctagctcctttcctttttttagttatatcaataaaataactaacacaattaattaaaatcttccttaccaatttcaacagatggatagtgaggtaaagttgttaaatctgtatcgagtggtaaatcataaacagcaagataatcattggggtacttacttgtcagctctgccattttttcagaaatacgagacttatcagaagaagcaaaaacgacttcaacgatagctttctcagcattatcaatataagcatgaacaatgattttcagcatatttcctccgattaacactttaaaaatccattccttcacccatttccgcaatggtatctggttcatcactaaacaaagtaatgtgtcccattttgcggttatgttttgcctctagtttaccataaaggtggaggtgagcgctaggattttcttgcacataagcttgcgctttttccatgtgttgtccaagaacattcagcataacagctggttgatggaggtgaatttttggaagtggcaagccgagaactcccaaaatatgtgtgtcaaattgtgaaaaatcacaggcttcaattgaatagtgtcctgaattatggggacgtggtgcaatttcattgacgataatatcatcaggtgtcgcaaacatttcgacacaaagtgtaccagacaattccagtttttcagcgatttgaacagccatagcctgcgctttttgagcaagttcatcagaaatgcgagctggtacaattgttttagataagatattattgcgatgaatattttcttgtactggaaaaacggtcatatccttgccatttcctgaaacaatcactgaaatttcaaggtcaaaattcacaaattcttccaaaacacattcgcaagaattggctaatttattagcgtcagctaagttttcaactgatttaatcacgatttgaccatgaccatcataaccaccagttgctgtttttaaaacatatttcttagataaatcaatatcctcaaggtcaagacttgatgtgacgaccttgtacggtgctactttcacacctgctgttttagctagaaagtctttttcaaagatacggttttgcgaaatacgaagcaaatcagttccttgcggtaattgcccttccttgacaaccgcatccaaagcatccgcatcaacattttcaaactcataagtgagcacatcgcagcgttttgctagttcacgcatagcttcaacatcatcgtaaggtgccacaatcatatcactcacacgtgaagctgggcaatctgctgcggggtccaaagtaaccactttatgccccatatagatagctgaaatagccatcatttgcccaagttgtccaccaccgataataccgattgttttagtcgagttcatctgttgaagcctccgcaactttaccttgttcaagtgcaaagttttctagtttttctgccaattcagtatcttcaattgccaaaatacgaagagctgttagggcagcattagttgctcctgactctccgatagccatagttgccacaggtactccaccaggcatttgaacgattgaataaagcgaatccagtccgctaagcgcgcgtgatttcacaggaacaccaataactggaagtgtcgttttagctgcgaccataccaggcaaatgagcagcaccaccagcaccagcaataatcaccttaataccacgccctcgtgcttcttcggcgtgtttaaacatcaaatctggtgtacgatgtgcagaaacaactttcttttcatacgccacaccaaattgatcaagtacctctgctgtttttttcatggtagcccaatcagatttactacccatgataactgaaattaatggtttcattattttccttccaattgttttatatcttcaacatcaacaacatgatagccaagttcttttaatttttgagcaaagagcccactacctgccactttttgtccagaaaagtttccatcatagacttgattaacaccacatgacggactacgtgattgtaaaattgctaaatcaattgactttccagccatttcatctagacaacgtttaatgcccttttcaaacatctcatcataacaattaccagcaacatcaacaacacgaccgtcacacaattcaactggttctcgtggtgtaggcaaacctgctaacacttctggacaaacagctatcacatctttgtcagcaacataatctacaagggcttgattgtaattatgacctccgttatacttacatctttcgcccaaaagacaagcgctgactaaaatacattttggtttaacgtccaatagctttgcttccgatatcgtttcgatagaaaagacctgttgtgtcttgagttgcaagttcagcatagataacatcttgtgctgatttaacatcttccttagttgttaccagcatgtaaacccgaccaccatttgaaagaagtgctttatcatcagcaaatttagcacctgcataataagtgataatatcacctgacgttttctcaggaaggcggacacctttttcataagcaactggataaccttctgaagccacaacaacaccaagagtgacccctttgtctgtccaagtgatttctggagctttgccatctaaaatgtcagtgatattttgagcaaaatcagatgtcaaacgtggtaagataacttgggtttcagggtcaccaaaacgtgagttaaattcgataacttttggaccatcagctgtcaaaataagtcctgcataaagaacaccaagatatggacgcccttccgcaatcataccattaagaactggcttcacaattgtttctacagctgtgtcaacaacactttgtggcaaatgtggaactggtgcataagctcccataccaccagtattaggacctttatcgtcatcaaaagcacgtttgtggtcttgtgcagttggcatgatatagaatttatcaccattaacaaaggcaaataatgaaaattcttcaccatcaagaaattcttcaatgaccacacgcgcaccagaatcaccaaatttattatcaagcaacatttcatgcgccgcttcgattgcttgttctactgtttcggcaacgacaacacctttaccaagcgccaaaccgtcagccttaacaacaattggtgcaccgtgttcttcaatatagctctttgcttgctcaaaatctgagaaagtgccgtaagcagctgttggaacatggtatttagccatgattgatttagcaaaatctttagaccattcaagctctgcagctgctttacttggtccaaatgctttcaaaccagcagcattaaaatcgtcaacgattcctgcagccaaagcatcatcaggtccgataaatgtccaagcaatatcattagctttcgcaaaatcaatcagcttagaatgttcggaaataccgatatttaccaaatcaagtccatcaagtgtcatgccatcattaccaggtgctacaaaaacctgattcacttgaggagattccaacaacttcttagcaatagcgtgctcgcgcccaccagagccaacaactaaaagtttcataagtaaaaatacctcaatacaaacatcacaggagcctaagctccaaactcaacaaagtacgcaaaaatatattttacgaattatataaatacattataacatatttgttcggaaattatcgcaattcatataacaagtttgtaaaaaataatagaactacaacaaaaaagaagcatcttgccgtttcaaaacacttccctttctgactttatcttatctaatctattttttaactaagaacgcagaagacattctgccagttcctcattcccataatattatttaaaattttgcctacaatccattatttcaagaacaagactcatagagaattattcttgtaggagattataatccccaccaatttcctaaacttccaaacatttattttctcctttcccctatctttgttcttattataaaaaattctataaaaaaacaacatgacaaaaatgtcatgttgttgtatccaatttccattcttctttcaacttattttctaaataggtatcgccaactaatcttgcaaataatgttgcatttgtaaaagactgttctgctgcaacaaaatcatgtttaaactttaaataatacttccactctaccagacttaaaattgggcgacgctggaagtcatgaatttctgtcataatactattactgatttcaataacacgttcaacataattttctcgtccatatttaaatgctaaatcaatattatttaacaacacattatttaaaatcaaatcggtttctggcgaaatacgtttttgattgattagtctcttcatcagtttatcgtaaaaagttatactataaattccttcagttgtcttagccgattccaaacaaataaaatagaggtcaatcaaaatcaaatcattaatgttaaacaattgttttcggttaacttggtcaaaataatcatttaaaattccttcaccaaaattaacatcatcactaaaatggacatccagtttagcctgtaagcaatcaataattaatctttcttcttcgggaataatatcataaaatttctctgaaatttcgtcaaaatattctcccttacgctccaatctaactttatccccatatgtcggtgtacgaatcaaaagatactttaactcttcataccgtctaggcaattccaagctatcaccatccgtcattgtccccaagctaacaccaagttgattggcaatgaattgggctttacttaggctaggaattgactgattggactcaattctagctagctgtctcacagacaattctgtttcatcaccacagaattcctcacgtgaaattcccttttcctctcttaatgcacgtactttaatcccaaacttttccaacttaatctcctatcagcaaaaaagtatatattttatattttagcatatcctcatctctcgacaaaataattcccttaaaaatagcgaattttctgataaaaacaaataaaaataacccaagcctccttttcttaggtagcttggggtaaattaatataatcaattatgaaactttaccttacaggagcataagaagcactcccaatgcattattgataaaatggatagctattgtatactccagtttctgtgtcttatgataaaaaacagcaagtaccaatcccataccaccgtaaataacccaacttccaatattagttggcatatgcaataaaccaaaaagaagagagctaatgataacaccaaaataagaattattaaaggtacgtcctaagataagtccacgcataactgtttcttctacaatcggtgcagcaataacagtcaatacaattaacaaaagaggtgacattccaagctgctcaagtgctgcttggttttctgtatttgccccaagaccattttctaaaagtaaaataataccaccaatatacttaacgacagttagtacaacaaagcctatcaaaaccgtcttccaagcttgccaggtctttaattcctctaaatgattcaacagcccaagtcgcttagcaacatagactgtgaaagcagcaactaccaaaagagctaaagtaattaatacagattgccaaaatggttgatttgccgtaataaaagcagttggcaactgttccagtaaaatcaaacctaaggccaaaaagaaatattttaaagctgttaaaaattttttcatgatatcacctcttataaaattcttgtaaatattagtttaaagaaaacaaatcccaaaaataaactatacaaccaaatcagcaaaactatcggatacgttaacaccacgcccataaaagcatataagataatcaacataaaattctctaaaaataagaaaatcaaagttgatatagctgtcaccctcaaaataaattgattgcgctcatcataagctgctatgtaagctgcttttaaccgattcggctgccttgtcaaagttaaataatagatagcaactactattcctgctactcctccgcctagtaataaaccagccgcaaaatcattggtcttgataaaaaatgaaatcaataaacataaagcagcaacaaatagaaaacttaatgatactgtcatcatataatgacgatattcttccaatgtctttttccgagttagacttattaaagcttttaaaaccaaaattttctccctttatttccccaaaattttatcttgaaaaaaagtaatagataatacgtttaacatgatactcattgctagtaaaaaacctgataaaaggtcactcagattagctaccaatgccgtaagtaacaatagttgccctaaacttagcgtagcaagaccaatgtttttcaacgtcacatggttgctgtttttcatagtctcataaagcatgttcatctttttctcctacttttcatcttcaaaaataaaaatctcttcaattgttttcccaaagtatttagcgattttatgagctaactccaaagaagcattataacgtcccttttcaagtgagataatcgtctgccttgtcacagctaacgcttctgccagttctgcttgactaattttatttgctttgcgtagttcttggatttttgtttccatttcctcctccatatcgcatcaattggtaaaggagactttacatttttagtatagtttactttacattttttgtcaagtttattttacattttttataaaataatcaaaaaagctgacccattcaggtcaacttttctggtcttatcataatatttgataacttaattagtagaatttttaaaacgttcaacgtcgcgcgcaatcacaagttcttcatcggttgggataaccatagttttcacacgcgcttgatctgttgaaataacgccataggctcctgacacattcttagctgggtctgtatcaacaccaaaccaagtcatgccagaaataatatcctcacgaacaacgcttgaattttcaccgatacctgccgtaaagacaatagcatcggcgccattcaaaaccgcaaaatactgtgcaatgtattttcgtaatcgatcaatatacatgtcataagctaactgacatttttcatcgccctcttcttttccagcaagaatatcacgcatatcacttgatttctcagaaataccaagaagacctgaatcgcgatttaataccgtacgaattttttgagggctatcgagatttggttcacattctagtaaatacgtaatcacaccaggatcaatgcttcctgaacgtgtccccatcattgttccaccaagcggtgtcaagcccattgaagtatcaacagatttaccgtccttgatcgcagtcacggacaccccattaccaatatggcaagtaatcaatttcaaatcttccaaaggttttcctaaaacctttgccgcttcttgcgcgacatattggtgacttgttccatgggcaccatatttacgaatcttataatcagtataataacgatttgcaatcggatagcggtatgctacttcgggcattgttgcatgaaaagcagtatcaaaaacaacaacacttgtaatgtcaggcaaaaggtctttaaaagctctaattccaagagctgctccaggattgtgaagcggtgctaacatggataactcttcaacttgttgaatgactttatcagttaccaaagccgagtctttgaaatactcacctccagcaacgacacggtgtccaacacctgtgatttcatcataactagcaatgatattcattgaaatcaaatcatccaagagaattttaacagccgctgtgtggtctggaatatccttggtctcagatttcgtctgtccattaaatttaaccgtggaaacaccattgacaagaccaatacgttcaattagtccttttgcaataacttcttcttctggcatattatacaattgccatttcagacttgaacttcctgcattaatagaaatagttttcgccataaatttacctctaaagcgctttcatgttatatccctattctatcacatttttttaaaaattcatattatcaactttccatttttgaaattttctaatgaaatcagtcagagcttcacgactttgtaagtcagaaagtggataaacaaaggtttctggcgtatgcgcagcctgttttttcaaaacaaaaattgattttgcattcactgcattaccaaaaatagattctggcaaggtaatcacggcgataatatccgcgtaatctttcaaccattgtttcaataaatcactttgcttacttgtcaaaagactgacaggcgccaaaaagactgcaataccatcttttttgagatattttaacgattgttccattaacaaatgatgggcataggtatgctcatcagaacttgccactttataacgtttggcaatgtcatcattaggataaaaaccaactggcaaatcactaataatcacatcactttctttcagaatttgtggacgcacagcatcttcttgaataaactgagcatcagaatccatcacttctgcaatacttgctgataaatcaatcaataaatcgtcaacttcaataccaagataatttaattctttagacgaattatttaacaatgtttgagcaaggtttcctgtcccactaccaatttctaaaagatcaattttatctgaatctgtcagattttcaatcaagaacagcaaaataaaaccaatagcatctggtgtaaattgatgattggcttgcagctgctctgtttgaccagctttgataaagataaattggaaagctcgacgccactcttctttggtcaatgcaagctgacgcagtttctcattgttggcagcaacttcttcactggcaccttcagcccccaagtaaaaagaattctgttcaataagcgcatcataaatatgagtttttaactcattttcaattaattggatattttctaaaatcagctcataggctgtttcaattttttcaaaattcatcttgtcctccgcaaccctatcatatcaaaaaacgcaggaaatgaaaagaaagccctaattagctttctctttctgggctctttggaaaacatagtcaaattcttgttgattaggcagtttgaccaccacctgcaatcgattatcttggaagttgtagtcagctactccttggtcaaatgtaaggtgaccagtatcctcttttgccaaatcttttgttaattctgccattaaataagcctgactagcagatagctgcgcttggtgttgtcgctccattgccacgacacgtcctagataaaattgtaaaagcaaggcaaaaattgctgccataagcaaagcatagattaaaatccctgccttaacttgccgtttcaaaagtgtaaacaaatgtcctctccaaaccattctctaaattcaatgtcattgtcatcttctgaccatctctagaaatagcagaagattttactccaaatatcattggctgatagccttgaccagatgcgtttgttttacgaaaatcatcagcctttgactgtccaaatgccaacttttgactggacttcgtcacatatagcttgttattttcaaccttatctaattgacaattggcaagttccgcacgcagctgttgtgaaaacaaaagccagttttcctcttgattttccgacaaataatgcacatttgcagaaatagattgcgttaagccattgtaaacaagaatggcacccgaaattaccaataaagaaaccaaacattctatgagggtgaatgcctttaaactagtcttttttaacgtgtaatatctccgttttcccctcataaacatagacctctccatcttttttgataatctcaacctcaacaccatttaacttcaaatgattttgccctgtttgcacagccattgttgccacattaagaacttcctgctgccgtaaactttcttgcatagactgcctatttttatcaatttcccctaaaacaatactcgtaatcatcgctaacaatcctagtgctatcaagctttcaaggagtatgtaagcttttagtttctgtctttttatatttaccactccctaaatataattgatagttgacctctttatctgacgtttgaaaggttaattttgccaaggacgaattgcctcctgctttgtcgaaattgacttgataagttttatctactttgaccgacggagggagttttacagttgaaaaatcagttgacacttcctcttgcgaaacagtcaacgtaagactttgttgcctagcattagctaatttttgcgtgtcacaatagagattttcaaacgataaaaagaaaatcttttcttccacattttgaaaaataccattcaaagagcctgacaacatcatgataataaaacaggaaattcctagtgttaataaactttctaaaagggtaaaagctgaaactgttttattttttagcttcattgtaagtttttgcttgttcagaagtgatgtagccaacttcaactaaatcatcaacagtcggtttatctcccgttttcacttcgtacaaatccatttggctctctaccactttcacaacagcagcatcgcctttttcacgaacaacatccttttgcttactcaaattcggtacaaaaagcaacattaaaacactgataataagaagcacaatcaacatctccacaagtgtgaacccttttaccgttttctgacgtaattttttccaaaactttttcattaaaaatttcctcccatattttgatacattggcaacaacattgccacataaattaacacaataatcaaagccacaaagacaaaaacaagtggttgaatgagctgtgttgcttgagtcaatttgccaaaaaagctctgccatgtttcctcagcataaatgtctaactcacgtcccagcttcgatttgacctcaccatattcaatcattaggctcaattctcgcaaaaagaatggatagcccagaactttttgatgaaaagcttgccctgaaagcaacgcttcttccatatcctttccaatctcttgaaataagagcgacttttgcttttgcatgattcccacgattgccattaattcaataccttgcccaatcaaatttccccattcacgcgcatagtaagctgtcaaatataacctaacatagtttcccacaagtggaatccggcttattcgactatataaatcaatctgcgataaacgcctagcataaaatgtcgcacaagcaagtaacactccaatcgagaaaatacttagcaaaaaaatcgttggaaaatgcgtaataatctgcgttaccacattttggctttccagctgtggcagtagataattcttcaaccccagcataatcaaaataagaaacaacaacaaaatcaatggatacgttgcaacttcaatcaacttttttctgacgacagtcatgctagaaaggtaagactcaatcttcagcagacttttctgactgtttccatgaacatcagccaaagcaatttgtgtgacaatattgtctgaaaaccctaaatctgccatcattgttgctaggctagcaccatttaacaaactttcttgcattctctcaacataaatgtctaacaacaattgacttcttcggagaaaagacacgatttctgttaaattaaacccactttcaaaaagattattaaagagttgaataaccttgcgctgttttttaaatggcaattttttcgatttttgcttgttcagctgtgatatgtccgtctttaacaagactttcaatttttgtattccagcactctggtcggtgactttcaaagttttctttagcaaaatcaatcacacctcctccgccaattaagcgttgataaacaatggcacgcaaactattttccaattcttgcttactaacccctaattccaaaagacgtgcgtaaacaccagggatgctcttcgcatgaatggtcgaaaatacaacagctcccgtcaaactcgcacgaatgactgcacgcgctgtctcgctatcacgaatttctccgataatcagaatatctggtctatggcgaagcgataatttaatcagctcgtcataagtcatcccaatatcactatttaactgcaactgcaacatttgttcctgtttgatttcaacaggatcctcaattgtaatgacttgcttattaggaaatttttcacgaaccaattggtacatgagagtggtttttccactccctactggtcccgaaaaaaggtaaagccccctactatcaatggcttctaaaatatttttcatcccgtcaaaccaatattgtaaatcatgacgaccagaataaagcaagcgaatcactaaactttctcgtccacgataatcaccaacactcgacaaacgaagcgaaatctcttcctcatctgcaaattgataatcacaagaacctagctggctgcgacgtttctccccaacattcataccagccacaaatttaaaatgactaatcaagctagtcatctgctctagctcaaaataatcaacaaattgccgttggtctcccacgcgttgatacacttcataacagtcttctctaggtaaaatgtaaatatcttgcgcattaacttcaacagcatccttaatgagttgctttgctttttcctgaatcatcttgacctcctacttttctattcgtaaattagtcataaaaaacaaaaaaatcatggaaaaaattccatgattacgattctaatttacaattttgaggtctcggtcttgattcatcattttgaacgttaaaatgataagaaaaggtcccttcaggtaattcttgaccgtctttgagcattaaaatggaatggtactgttgcagataatccccacaattctcacaccaacgttgctctgttttatcccagaaagccgcctgaagattatcatgacatttacaacttggtaaagtcgttttaagagataaccattctgttttgtagaaagagaaagcatcctcaaaatactcaaaacatttttcttctataatatctttttgccaatctttcaagaaccaccacggctcccaatccccatacatttttatcacttgatacatttaacacacttccttacggaatttattatataaaaattaaaagctttttaaaaagaatttgcttatttagaattattattatcagcaaaattccgatgataacaagcaaaaaggtctgagaattttcctctcagaccttttcatttattagcataaaatgtgaattaaccttattcagcatctgttgaaacagttgcttcaactgtttctgcttcttcacttgtttcaagttcattaacagcttgtggttcaaggttgcggtaacgagccatacctgtaccagctggaatgattttaccgataataacattttctttaagaccaagaagatgatctttcttaccacggatagcagcatctgtaagaacacgagttgtttcttggaatgatgcggctgacaagaatgagttagtttcaagcgaagcttttgtaatccccataagcactggacgtgatgttgcagggataccaccagagataacaacatctttgttagcatccgtaaagtctgcaatatccataagtgtgcctgggagaagttctgtatcacctggatccatgatacgaactttgcgaagcatttggcgaaccattacttcgacgtgtttatcaccgatttctaccccttggctacggtaaactttttgtacttcagcaagaaggtaagtttcaactgataatgtgtcacgaacttcaaggagacgtttaggttggatagaaccttcagtaagtggagcaccacggtgtacctcatcaccaacagcaactttcatgcgggcagtgaatggtaccacgtattcacccataccagttttaccttgaacgtaaactttcttagtacgtgtagaagcatcttcttcgatgtcaacaacagtacctttaacttcagtgataacggcttcccctttaggattacgagcttcaaagatttcttggatacgaggaagaccttgtgtgatatcggtatttgacgcaacaccacccgtgtggaaggtacgcattgtaagctgtgtaccaggttcaccgatagattgagcggcaattgtaccaactgcttcaccaacttcaaccgcatcacctgttgcaaggttgacaccataacagtgacggcagacaccatgacgagtgttacatgtaaatactgaacggattgtaacttcttcaacaccagctttaacaatttcagctgccatatcttcagtaatcaatacatctggaccaacgataacttcgccagtttcaggatgtttaacagatttcttagtgtaacgaccaacaagacgttcttcaagagtttctgttacttctttaccatcagtaatagcacgaataacaagaccacggtcagttccacaatcgtcttcacgaatgataacgtcttgggcaacgtcaaccaaacgacgagtaaggtaaccagagtcggcagtcttaagggctgtatcggtcatacctttacgagcaccgtgagtagagaagaacatttccaagacagacaaaccttcacggaagttagataggataggcaattccatgatacgtccgttcggagcagccatcaaaccacgcataccggcaagttgtgagaagttagaaatgttaccacgagctcctgagtccatcatcataacgataggattcttaggatcttgtgtttcaatcagacgttgttcaagttcttctttagcttcacgccatgttgttgtaacagcaacataacggtcatcatcagtcatcaaaccacgacggaaggctttgttgatttgttcaactttgctgtgagctgcatcgataatttcttgtttgttatcgataactgggatatcggcgatacccactgtcaaaccagcaagagttgaatgatagtaaccaaggtctttcaagcggtcaaggaaagctgatgtttctgttgtacggaaacgtttaaagatttccgcaatgatatttccaagatttttcttcttaaatggtacattgatttccaagctgtcaatagcagattgaatatcttgtcctggtgccaagaagtacttatctggagttttttctgttaggttagcattgtttggctcttgaaggtaaggtaaatcctcaggcatgatatcgttgaagagaatcttacctacagttgtaaccaggattttatgtttctgttcgtcagtccatggtttatttggcatgctatcaacggcaatacccacacgagtatgcaagtgaacataaccattgcggtaagccataactgcttcatcacggtccttgaagatcattccttcaccttcacgacctggttcttccatagtaaggtagtagttaccaagaaccatatcttgagatggtgttacgactggtttaccatctttagggttaaggatgtgttctgcggcaagcataagaagacgtgcttcagcttgtgcttcttcagaaagtggcacgtggatggccatttggtcaccatcgaagtcggcattgtaggcttcacaaacaagtgggtgaagacgaagtgctttaccatcgataaggactggttcgaaggcttggatacccaaacggtgaagagtcggtgcgcggttaagaagcactgggtgttctttgataacttcttcaagaatatcccaaatacgttcatcaccacgttcaaccatacgtttagctgctttaacgttaccagcatagtcacgcgcaacgatttcacgcattacgaatggtttgaacaattcgatagccatttcacgtggcacaccacattgatacattttaagtgttggacctacggcgataactgaacgcccagagaagtcaacacgtttaccaagcaagttttgacggaaacgaccttgtttacctttaagcatgtggctcaaagatttaagaggacggctaccaggaccagtgattggacgaccacgacgaccgttatcgataagagcatcaacagcttcttgcaacatacgtttttcattttgcacaatgatacctggggcattcaattcaagcaaacgagccaaacggttgttacggttgataacacgacggtaaaggtcatttaagtcagaggcagcgaaacgtccaccatccaattgaaccattggacgaagatctggtggaataactggcaagatgttaagtaccatccattctggtttgttaccagatttgtagaaagcatcgagcacatctaaacgacggacagctttgatacgtttttgccctgttgctgttttcaattcttctttaagttcagcgatttcagatttcaaatcaacgcgcttaagaagatcttggatagcttcagcacccattttcgcaacaaatgagccttgtccgtattcttgtaatttttcacgatattcacgctcagtcaaaagtgattttggttcaagcggagtatcttttggatcgataactacgtaagcagcgaagtaaataacttcttcaagagcacgtggactcatgtcaagagtaagtcccatgcgtgatggaatacctttgaagtaccagatgtgtgatactggagctttcaattcaatgtgtcccatgcgttcacgacgaactttagcacgtgttacttcaacaccacagcggtcacaaacaattcctttataacgaatacgtttatatttaccacaagcacattcccagtcttttgttggtccaaagattacttcatcaaaaagaccttcacgttctggtttgagcgtacgatagttgattgtttcaggttttttaacttcaccataagaccatgaacggactttacttggtgaggctaatgtgatttgcatacttttaaaacgatttacgtcaaccactagttttacctttctttattgttcttttgaaaatagcagagctactttctaacttgtcacgacttacaaactttttgtctgcaagacattatttatcgttataggactcattcaaacaatctgactaggaaaggcaaattttgtttgcactttccatgtctaaattgttatttcctattatttgttttcttcagcagaaacttctactttttcagcagattcagtttcttgtttttgacgagctttttcaaggtcatcaacgtgcataacatcgtcgtcttcaccttcatcaagatcacgaagttctacttcgttgtcatcttcatcaagcacacgcatatcaagaccaagtgattgcaattctttaacaagcactcggaatgattctggtacacctggttttggaattggtttacctttagtgatagcttcataagctttaagacgtccagtcacatcatctgacttgtatgtcaagatttcttgaaggacatttgatgcaccataagcttccaaagcccaaacttccatttcaccgaaacgttgtccaccaaattgtgctttaccaccaagaggttgttgtgtaacaagtgagtaaggaccaactgaacgagcgtgaagtttatcatcaaccatgtggtgaagtttgatcatgtacatgataccaacagagacacgattatcaaatggttcacctgtacgaccgtcataaagaactgtcttagcgtcgctatccataccagcttcacgaacagtatcccaaaggtcttctgaagttgccccgtcaaagactggagttgcaatgtgaataccgaggttacgagctgccataccaaggtgaagttccataacttgtccgatattcatacgagatggcaccccaagagggttcaacatgatatcaactggagttccgtctggaagatatggcatgtcttcaacaggaacgatacgagaaacaacccctttgtttccgtgacgaccggccattttatctccgactttgattttacgtttttgtgcaatgtaaacacgaacgagcatgttgacacctgattgcaattcatcaccgttagcacgtgtgaagattttaacatcacgaacaacaccgtctccaccgtgtggcacacgaagtgatgtatcacgtacttcacgagatttatcgccgaagattgcgtgaagaaggcgttcttcagcagaaaggtctttttcacctttaggtgttactttacctacaaggatatcaccttctttaacttcagcaccgatacggataatacccatttcgtcaaggtctttaagagcttcttcaccaacgtttggaatttcgcgagtgatttcttcagggcctaacttagtatcacgtgtttctgattcaaattcttccaagtgaacagatgtgtaaacatcttctttaacaagacgttcgctcatgataacggcatcttcatagttgtaaccatcccatgtcatgtaggcaacgattgggttttgaccaagtgccatttcacctttttccatagaaggtccgtcagcaatgaagtcacctttttcaacaatatcaccaactttaacaagtgtacgttggttgtatgctgtacctgagtttgaacgacggaatttagtgatgtggtaaacatcaagtgaaccatcttcacgacgaacttcaactttttcagcatctgagaaaactacgcgtccatcgtgtttagcgataacagcggcaccagaatcgtgagctgcttgatattccataccagtaccaacatatggtgcatgtgggtcaatcaatggcaccgcttgacgttgcatgttggcacccataagggcacggtttgagtcatcgttttcaaggaaaggaatacatgctgtcgcaacggcaactacttgtttaggagaaacatctacgaagtcaacgatgtttgatgggaattcttggttattaccttgatgacgtcccataacgatttcttcagcgaatgttccatcttcgttaagttttgagttagcttgcgctactgtgtattcatcttcttcatcggcagtcaaccaaacaatttcgtttgtaaccacaccagtagcacggtcaactttacgatatggtgtttggatgaaaccatatttattaagatgtccgtatgttgacaagttattaatcaaaccgatgttaggtccttcaggagtttcaatcggacacatacgaccatagtgagtgtagtgcacgtcacgaacttcataaccagcacggtcacgagtcaaaccaccaggtcctaaggctgacaaacgacgtttgtgagacaattcagaaagtgggttgtgttggtccatgaactgtgacaattgagaagaaccgaaaaattctttaacagccgcagttacaggacgaatgttgatgatttgttgtggtgtcaacacttcattgtcttgaactgacatacgttcacgaacattacgttccatacgagcaagaccaatacggaattggttagcaagcaattcaccaacggcacgaatacgacggttaccaaggtggtcgatatcgtcaactttaccaagaccttcagcaaggttaaggaagtatgacatttcagccaagatgtctgctggtgtaagcgcacgcgctttatcatcaggattggcattacccacgattgtaacaacgcggtctgggtcaactggtgacacaactttgaatttttgaagaacaacaggttcagtgacaacagcgtaatcatttggtgtataaacaaatttgttaaggtcaccgtctaattgttcagcaattgaatcaatcacgtcacgtgtcattacggtaccagcttcaacaagaatttcaccagtttcagcatcaaccaagttttcagcaatggtttgattcaagagacgagtcttgacgttaagttttttattgattttgtaacgtccaacagctgccaagtcataacgacgtgggtcaaagaaacgagctacaagcaaactacgtgagctatcagctgtttttggttcacctggacgaaggcgttcgtaaatttctttaagtgcttcgtcagtacgtgaatctgctggatttttgtgaatatctttttcaatagtattacgaacgagctcgctatcaccaaagatatccatgatttcatcatcacctgagaaaccaagcgcacgtacaagtgttgtaaatggaattttacgtgtacggtcaatacgtgtgtaagcaatgtcttttgaatctgtttctaattcaagccaagctccacggttaggaattacagttgaaccgtaaccaactttaccgtttttatcaactttatcgttgaaataaacaccaggagaacgaaccaactgagaaacgataatacgttcaccaccattgatgatgaatgtacccatttcggtcatgattgggaaatcaccgaagaaaacttcttgagttttgatttctcctgtttctttattaatcaaacggaaggttacaaaaataggtgctgaataagatgcatcgtggatacgagcttcttcaagcgtatatttaggctcttttaactcgtaaccaacaaattcaagctccatagtatccgtaaagtttgtaatcggaagtacatcttcaaaaacttctctcaatccattatccaagaagtctttaaaagaatccgtttgaatttcaatcaagttaggtaaatcaagaacttccttgattcttgaaaagctacgacgtgtacggtgtttcccgtactgaacttcatgtcctgccaagttttttactccttcattaaaatacagaggtcaataaatgtcacataacccgattcccttcattttgacgagaatcatcattatttttcatcttgacctttatagttaggctgctcgttaaaacaccctgccaagtgtgtcgttgatgtgaatttttagaatctttaaatataggttacaactcctattttttctaaaattaggcacaaaaagagcagctaaatctgaccaataaaagtgtgatttaactgctgtaaaccttagttggacaatatttcaactaaagcagacgacaaatagttattaacattataccttattttttcaatttttgcaagtatattagttgctgctacttgttgtgatagatgaattactcaacaaactttcccaagcttttgtataatcactatctgtaccaccaatagcaaatttataagtcattgtacccgcaccattcttagcccagtaacttgtcgttgtttcaccactcacagtaagcgaacgaccattgaccgtcaccgtaccaggctgtaaacctgttgctttaagaacagttgatttgataacacttgaagacaaactatatttcttatcaacacctaagacacttgaatcagcattgtagatagcattaaccaaataagccatgtactgcgcgttgtaagtgtgtcctgctgcatcaggcaaggaagtattatcgtcattacctgcccaaccaccaagcgttacttttggtgttgacaacaacagccaaacatcggtgtaattatcagtcgtaccagtttttcctgaccaatccgcactagcagctgtcgcatttaaactcttcaaatctgcataaaatttcgtcgtaccaccaccagtgataacctcttttaacaactgattcaaaatgctagccgttgcttcagaaaagacacgtacaggattagccttatgttgataaataacattcccttgactatctgtgatactgtcaaccatgtaacctttcaagtaaacaccaccatttgaaatcatttggtaagcattaacttgctgaagaaccgttgtctcaattcctccacctaaaggcaagctttcaatcgaataatcatcaatatcatatcccattttcttcatgtaagattcaacatcaacgtcatcattgagcaacatttgatacgtccaataagctggaatattccatgatgtattcaaagcttcttggagagtaaccattgccgttccttcttcactaccgtgcatgattgactgaccactagagaaagtcgtcggatagttagatagcatactagcactacctaaaagcccttggtcaatggcaatcccatacgcgataatcggcttaatacttgaccctggtgatcgcgcagtgtcaaatgcatggttattctggttggttgaataatcccgaccaccaatgaagcctagaatagctccagttgaattatccatcaagacattaccaacttcaaccgtttctgagctcccttgatcaagcgtgctaccgtattgtgctacggtattctgcatggcgttataaacatctttatcaattgttgttttgatggtatagccaccctgttgcagcgcttctaaagccaatttttggtaagattccttcgttgaatcatttttcaattcttgttcagaaacaccattttgctcaaccaaataatcatacatgatatcctgagcctcttctaaaacggcataataaaggaaatcatgttcactcgttgtcgttgattcaggttgaatgaaatcctgactaacatcataagccttatattcctcatattcagctttagtcaaatagcctgcgcgatacatattgtaaagaacatcttgctgacgagacaaaccataagccatatcctcctcgtctttcagctgccctgcagctgtgtacggagaatagacaatcggactttgtggcaaaccagctaaaaatgccgcttgtggaattgtcaaatcactggctgaaacgccaaaaataccttgcgctgcttcttcaatcccagcaatattttcacctttattattacgtccgaatggagagacattaagataatcagtcaaaatctcatctttactcaaataacgttctagcgccaatgcgtagataatttcgcgtgatttacgtttaaaggttggatcgtctcccaaaatttgctgtttaatcaactgttgcgtaagagttgacccaccacttgtctcacccaaaccaagcactgaagctaaggttgcacgaaaaacagcttttggaacaacaccatcatggctctcgaagttttcatcctcagtcgcaataatggcttttttaacattgtctgaaatagcgtcgctttcaacaggtgttcgcaacaaatcagtatcaatacttgcaatcgaactaccatcagaatacgacatctctgaaatcctagtcagagatgttacctgactaaccagactttccttgctaggaactttgacagaatcaatctgacttgcaagataaccaaaagctatccccgcccctaacatcccaaacaggatgataataatataaaaaaagtcggttaataatttcactgttcttaaaacaaccgaacccaaatctataacactaagtttctggtgattggtttttttctttttcttgtttctcttaaacattctaatacctcattaatattataccaaactttgataaagcttgcatagaagtaccgctttttgatataatagcctgtaaactacaatatatcattggggtagatttagcttagctagaaattactatcaacctcaaaattttaagtaaggagaaagctcgtgaacatattcgaagaactcaaagaacgtggcttagtttttcaaacgactgatgaagaagcccttgtcaaagcattaacagaagggcaagtatcctattatactggttatgatcctacagctgatagcttgcaccttggtcacctagttgctattttaacatcacgccgccttcaattggcaggacataaaccatatgctcttgttggaggagctactggacttatcggtgacccatcattcaaagatgctgaacgcagtcttcaaactaaagaaactgttgacggctgggtaactaagattcaaaatcaattatcacgtttccttgatttcgaaaatggtgacaacaaagccgttatggtaaacaactatgattggtttggtaatgtcagcttcattgacttcctacgtgatgtcggaaaatactttactgtcaacgctatgatgagtaaagaatccgttaaaaaacgtatcgaaactggtatctcatacactgaattcgcctaccaaatcatgcaaggttacgatttctacgaattaaatgacaaatacaacgttaccttgcaaatcggtggttcagaccaatggggaaatatgactgctggtacagagttgctacgccgcaaagctgataaaacaggtcacgtcatgaccgtaccactcatcactgattcaacaggtaaaaaattcggtaaatctgaaggaaatgctgtttggcttgatgccgacaaaacatctccatacgaaatgtatcaattctggctcaacgttatggatgacgacgctgttcgcttcttgaaaatcttcacattcctttcactagaagaaatcgctgaaatcgaaaaagaattcaacgcagctcgtcacgaacgtttagcacaaaaaatcttagcacgcgaagttgtcacacttgttcacggcgaagaagcttacaaacaagcccttaaaatcactgaacaacttttcgctggaaacatcaagaacctttcagcaaaagaattgaaacaaggtctaaacaacgttcctaactacgctgttcaagccgacgataaccgcaatatcgttgaagttcttgtagccgcaaaaatctcaccatcaaaacgtcaagcacgtgaagacgttcaaaatggtgccatctacatcaacggtgaacgtatccaagatttagattacacactttctgacgacgataaaatcgataacgaactaacagttatccgtcgcggtaagaaaaaatacttcgtgttaacatactaattagcacaatctttacaggcaccattgggtgtctgttttttatcacaacaaaaaaaagagggagagcccctctttttttagctattacgatgaaaaatcatattaaataaattcaccaaaaggaaaattcccacaaaaataaccgtaatggttgcactcgcaggtgtttcccagtagtaagaggtgataataccagctaccataccgataaaaccaacgattacaccaataagaatgaccgatttaaaattcttccccaagcgcatagcaatacttgctggcaaaaccataatcgttgaaaccaaaagagctccagccgcaggaattgtcaaagcaatcgcaatccctgtcacaatattaaagagaacagacattaaacgaacaggcagaccatcaacaaaagctgtctcctcatcaaatgtcaaaatatacattggtctaataaataaaatcgttagaagcacaacaacaactgcaatggtaaatagcgcaattacctgccccatatttatcgtaataatcgaaccaaacaaatattgatctaaattaacactactaccattttcagacttactcgtcacaatcaacgaaatcgccaaaccaagtgacattaaaatagctgttgaaatttcaacataatgcttataaaccgtctgcaagtactccaaaataaccgcagcaatcgtgacaacaataatcgttgaccaagttgtcgatgtcccaagcaaaatgcctaaggcaacaccagccaaagaaacgtggctaagcgtatcactcatcaaactttgatgacgtaagataaggaaaattcctagaatcggggcaaaaatactaatagcaatgactgccataacagcacgttgcaaaaaatcataagaaaatatttcaatcaacatcagcagcccctttcacatcagtaccatgcacattaaaacaacgccatggcgtcttttgattacgtaccaaatgaatgttacggtcagcataatgttttacctcatctggatcatgagtaatcatcaaaacagattttccatgtttatgcgcactatgatgcatcaactcataaaaagtttctgtcgttccagcatccataccagtagttggttcatccaaaataaaaatatcaggatcagatgcaaaaattctagcaataacaacacgctgtttttgcccacctgacaagctaccgattctcttatgacgattttcccacatgccaacagattctaaactaattttgacatgttcatcatcatgcttggtcagacgacgaaaccaaccattcctcggataacgccctgatttcacaaattcataaaccgttgacggaaaacctgcattaaaactcgcaatttgctgtggtaaataagcaatgcggagcttcttaccctctttattcgtttttgaaatagttacttgaccactcttgggtgtcaaaatacctaatgtcgcctttaccagcgtagatttggcagcaccattttcacctgttaaagtgacaaattctccactatcaagatgatagttaattccttctaaaactggctcactatcatattgaaaagacaaatcttctacagtaatatatctcattctcgcccttctaactcatctgaaaagaccttcaaaaatcgtgcaataacgtcttgttcatcaccagaaaactggttaaataaatttttgtaaacagccaatgttgcatcatgatgatgagtatgctctttggcaactggcttagcaatgtctgtcaattcaaaataggtcactcgcgcatcctctttatttttcacagacgctaacattccttgactcaccaaatacttaattgccttcgttaccgctgcctgactaatattcaaacgttttgccaaatcagaatttgtcaaacgttcttgtgacagaagcattaagatatgctcttgagtattcgttatggcaacaccactctgacaatcaccaaacaacaattcatgctgattttctgctttcaacaaaatttgatttactaacttatctacttgcttctctagctgcatatttcacacctcatttcattaaccagttaattatatcaaaaactaaaaaaagaatcaatgacttgactctttcctctataaaatacgaaccttgtaaacttccttacaaaagccacgcatactattgaccagacgatcggcttttttttccgaacgacacaaagcataaactgtcggaccacttcccgtcatcaaagcaacatctgctccacaattcatcatccgatccttgattttttgaataaatggcttgcgtttaatggtaatatcctccaaagaatttcccatatatgcaatcattttttcgtaatccttagcaagcaccgcctctcgtaacgaagcgatatctacacgtgaaatcgtcttacaatcaatttcaggaaaaaccgtacgtgttgaaacaccaaactcaggtttcaccaaaacaacccaagctgataattgataatcaagacattctacaatctctcccttaccagaaatacacgcacaacctgcctccagacagtacggaacatcactcccaatttgaaatccaacatcaatcatttcatccttagaaagattaagctgccataatttatccaaagctcgaattgtagcagcagcatctgtcgaaccaccgcccaaaccagcacaaataggaattgattttttcaattcaatcttaacccctgaatcaatctgacaaacctcacgaatcaatttagcagccttaaaaacgtcatttttatcattcaagggcattttatgattattagactcaaccacaatctcacttccatcaatttcagaaaccgtaatatagtcattcaaatcaacactaaccataatcatagataaatcatgataaccatccggtcgttttccaataatatctagccccaaattaatcttagctggtgccttctcaataatagccattcaataatccttttaaaatattacatctattatatcaaataattttagaagataacaaaaatatccacattcttcccaaaagccataaatttttaatattacgaacatcatcacccaaacattattcaatgatatatattccttacccaaacattattcaatgatatatattccttcttacttatctaaagtcaatcataataaaagcagtagcatgatttacattttgaataactgacaccccctacaattttcagtcttaagaacatattatattttaaaattaaacattaaaaagcgagaacaaaagttgttctcgctaaagcttaagtcatgtaaactactataattgacaaaataccatataagttcttcttagtgaagcaaaatttcaaaaataactcaatcttatcctctaaatatctcctttagacacactcagaaaattattaatctaaaaaatcccattattcttgacaaatgacagaaatatagcaaaaaagccccaaccaataggacttttttgctatattataccggcggccggggtcgaaccggcacgtccttgcggacactggattttgagtccagcgcgtctgccaattccgccacgccggcaaataaactggggtagctggattcgaaccaacgcatgagggagtcaaagtcccttgccttaccgcttggctataccccaataatagaaaggcgaatgatgggaatcgaacccacgcgtgccagagccacaatctggtgtgttaaccacttcaccacattcgccataacgtcaacacgggcagtaggaattgaacccacactgaaggttttggagaccttagttctacctttaaactatgcccgtaatatggaaggggagggattcgaacccccgaacccgaaggagcggatttacagtccgccgcgtttagcctcttcgctacccttcctaaaaatataaaattaatggcgcgagacggaatcgaaccgccgacacatggagcttcaatccattgctctaccaactgagctaccgagccttctattgcgggagcaggatttgaacctacgaccttcgggttatgagcccgacgagctacctagctgctccatcccgcgtcaacaatattaaaggaggatgtgggattcgaacccacgcacgcttttacacgcctgacggttttcaagaccgttcccttcagccggacttgggtaatcctccaaattataatagtccgtacgggattcgaacccgtgttaccgccgtgaaaaggcggtgtcttaaccccttgaccaacggaccatatttctaatgggcacaagtggactcgaaccaccgacctcacgcttatcaggcgtgcgctctaaccagctgagctatgcgcccaagaaaacttggataaccaataatataaagcgggtgacgagaatcgaactcgcgacaacagcttggaaggctgtagttttaccactaaactacacccgcatataaagttcttaatgggagttaacgggatcgaaccgctgaccctctgcttgtaaggcagatgctctcccagctgagctaaactcccttttgctaagcgactaccatatctaacagggggcaacccccaactacttcaggcgttctagggcttaactgctgtgttcggcatgggaacaggtgtatctcctaggctatcatcacttaactctgattgattatccaatcaaaattgaatacctatatattctaacaagtttccgacgcgctgtcaattctctcagttactttggataagtcctcgagctattagtattagtccgctacatgtgtcaccacacttccactcctaacctatctacctgatcatctctcagggctcttactgatattaaatcatgggaaatctcatcttgaggtgggcttcacacttagatgctttcagcgtttatcccttccctacatagctacccagcgatgcctttggcaagacaactggtacaccagcggtaagtccactctggtcctctcgtactaggagcagatcctctcaaatttcctacgcccgcgacggatagggaccgaactgtctcacgacgttctgaacccagctcgcgtgccgctttaatgggcgaacagcccaacccttgggaccgactacagccccaggatgcgacgagccgacatcgaggtgccaaacctccccgtcgatgtgaactcttgggggagataagcctgttatccccagggtagcttttatccgttgagcgatggcccttccatgcggaaccaccggatcactaagcccgactttcgtccctgctcgagttgtagctctcgcagtcaagctcccttatacctttacactctgcgaatgatttccaaccattctgagggaacctttgggcgcctccgttaccttttaggaggcgaccgccccagtcaaactgcccgtcagacactgtctccgatagggattacctatctaggttagagtagccataacacaagggtagtatcccaacaacgcctccaccgaaactagcgtcccgatttcgtaggctcctacctatcctgtacatgtggtacagatactcaatatcaaactgcagtaaagctccatggggtctttccgtcctgtcgcgggtaacctgcatcttcacaggtactaaaatttcaccgagtctctcgttgagacagtgcccaaatcattacgcctttcgtgcgggtcggaacttacccgacaaggaatttcgctaccttaggaccgttatagttacggccgccgtttactggggcttcaattcacaccttcgctaacgctaagcgctcctcttaaccttccagcaccgggcaggcgtcaccccctatacatcatcttacgatttagcagagagctgtgtttttgataaacagttgcttgggcctattcactgcggctgactctaagccagcgccccttctcccgaagttacggggccattttgccgagttccttaacgagagttctctcgctcacctgaggctactcgcctcgactacctgtgtcggtttgcggtacgggtagagtataattaacgctagaagcttttcttggcagtgtgacatcactaacttcgctacttaacttcgctccccatcacagctcaatgttatagatataagcatttgactcatatcacacctcactgcttagacgtgctcttccaatcgcacgctttagttagcctactgcgtccctccttcactatatactctagtacaggaatatcaacctgttggccatcggatacacctttcggtctctccttaggtcccgactaacccagggcggacgagccttcccctggaaaccttagtcttacggtggacaggattctcacctgtctttcgctactcataccggcattctcacttctatgcgttccagcgctcctcacggtacaccttcttcacacatagaacgctctcctaccatacctaaaaggtatccacagcttcggtaatatgttttagccccggtacattttcggcgcagggtcactcgactagtgagctattacgcactctttgaatgaatagctgcttctaagctaacatcctagttgtctgtgcaaccccacatccttttccacttaacatatattttgggaccttagctggtggtctgggctgtttccctttcgactacggatcttagcactcgcagtctgactgccgattatatctcattggcattcggagtttatctgatattggtaatccgggatggacccctcaatcaaacagtgctctacctccaagagacttaacatcgacgctagccctaaagctatttcggagagaaccagctatctccaagttcgtttggaatttctccgctacccacaagtcatccaagcacttttcaacgtgccctggttcgggcctccagtgagttttacctcaccttcaccctgctcatgggtaggtcacatggtttcgggtctacgacatgatactaagccgccctattaagactcggtttccctacggctccgtctcttcaacttaacctcgcatcatatcgtaactcgccggttcattctacaaaaggcacgctctcacccattaacgggctcgaacttgttgtaggcacacggtttcaggttctatttcactcccctcccggggtgcttttcacctttccctcacggtactggttcactatcggtcactagagagtatttagggttgggagatggtcctcccagattccgacgagatttctcgtgtctcgccgtactcaggatactgctagggtttaagactatttcgattacgaggctgttactctctttggcttaccttcccaggtaattcttctataatcttgcgtcccacaacgcagtcctacaaccccgatgtgtaaacacatcggtttgccctcttgccagttcgctcgccgctactaaggcaatcgcgtttgctttctcttcctgcagctacttagatgtttcagttcactgcgtcttcctcttcattaccttaacagtaatgagtgacatgcatcacatgccgggttcccccattcggacatctctggatcaatgtttacttacaactccccaaagcatttcgtcgttagtcacgtccttcatcggcttctagtgccaaggcatccaccgtgcgcccttattaacttaaccttattttggtcttctgaccttaaactcattaaatcacagcgtttcggtttatttcttgttactttctacaattatttctaattgcggaatttgatatagatattcaattttcaatggacaatcaccttgaatctttcgattcaatggagcctagcgggatcgaaccgctgacctcctgcgtgcaaagcaggcgctctcccagctgagctaaggccccacaagacctctcaaaactaaacaagacttcccaaacgtgcttccgttttttccttagaaaggaggtgatccagccgcaccttccgatacggctaccttgttacgacttcaccccaatcatctatcccaccttaggcggctggctcctaaaaggttacctcaccgacttcgggtgttacaaactctcgtggtgtgacgggcggtgtgtacaaggcccgggaacgtattcaccgcggcgtgctgatccgcgattactagcgattccgacttcatgtaggcgagttgcagcctacaatccgaactgagattggctttaagagatttgcttgccgtcaccgacttgcgactcgttgtaccaaccattgtagcacgtgtgtagcccaggtcataaggggcatgatgatttgacgtcatccccaccttcctccggtttattaccggcagtctcgctagagtgcccaactcaatgatggcaactaacaataggggttgcgctcgttgcgggacttaacccaacatctcacgacacgagctgacgacaaccatgcaccacctgtcaccgatgttccgaagaaactttctatctctagaaatagcatcgggatgtcaagacctggtaaggttcttcgcgttgcttcgaattaaaccacatgctccaccgcttgtgcgggcccccgtcaattcctttgagtttcaaccttgcggtcgtactccccaggcggagtgcttaatgcgttagctgcggcactaagccccggaaagggcctaacacctagcactcatcgtttacggcgtggactaccagggtatctaatcctgtttgctccccacgctttcgagcctcagcgtcagttacagaccagagagccgctttcgccaccggtgttcctccatatatctacgcatttcaccgctacacatggaattccactctccccttctgcactcaagtttaacagtttccaaagcgaacaatggttaagccactgcctttaacttcagacttattaaaccgcctgcgctcgctttacgcccaataaatccggacaacgctcgggacctacgtattaccgcggctgctggcacgtagttagccgtccctttctggtaagttaccgtcactgtgtgaactttccactctcacacacgttcttctcttacaacagagctttacgatccgaaaaccttcttcactcacgcggcgttgctcggtcagggttgcccccattgccgaagattccctactgctgcctcccgtaggagtctgggccgtgtctcagtcccagtgtggccgatcaccctctcaggtcggctatgtatcgtcgccttggtaggccgttaccccaccaactagctaatacaacgcaggtccatctactagtgatgcatttgcatctttcaagcatctaacatgtgttaaacactgttatgcggtattagctatcgtttccaatagttatcccccgctagtaggcaggttacctacgcgttactcacccgttcgcaactccttctactctagcaagctaaagtagtcagcgttctacttgcatgtattaggcacgccgccagcgttcgtcctgagccaggatcaaactctcatttaatcttgttctcattctgtcactgacagatttattttcttaacaggtcgatttctcaacccgcacgtttggttcgtcttgttcagttttcaaaggtctttgcctcttgcgagacaacttctatattctatcaaatctgaaacagcttgtcaactactttttcaagtttttttcaatcctgtttcaaaccgattaccgcatccctctcggacaacagctatattagtgtatcatctcaagcttactttgtcaagaacttttttagcttttctgtaaacctaagacctgccctcttgcgacagctcatctagtatactaaacttaggaaaaactgtcaactactttttagaaaattttctgattaaaatataaattttctttatttgaaagctctaaaatgcagttagccatttgagtgtatcaaaaacaccttagaaatataattgtaatcactacaaaaataattagaagagctctgattactacacaccaaaaaggggaatatttaataccagctcaaagaagagcattcctatcgtgaaatcgctagaagattggttaaagctcctaaaattattaacaacaaagccagcatgagcaagttacttttattgaaaattagataaataactgtcctcaaaagcgttagattataaacctctaaagagtttttacgaaatagctaacttagacttaaaatttgtttttaagatttttgagcactttaatcatcagaagtgttttatttgccgtaaatagccatttttaccatttacagtctttttatttaataaaaagctttatgggctgaattgggtcattaaaacgcattttatggctattataatcatacatgcataatttctttgtaaataatgcctctgcatgactgaaaactatatgagtttcaaagtaatttagttttttcaaaaaatctttgaactatcaaaaataagaaaaattgttttcctttatctttaacttcaaaaatgagacttaaaagttattctcactagggcttaaatttgtcatctactacaattaacaacaagtcaaaaaactcaaaaacgcctgcttacgaagtgtttctaatctagagacatttcgtaaacaagcgttactaaaaacaccaatatgatgagtgttcccgctaggaaaaatcctagcggtagaccagagctagactaagaactattcagttccatcatcataacactcaacaaaattgataaaaattatactaattcaatgattgccattggagcagcatcaccacggcgaggttctgttttaagaatacgagtgtatccaccgttgcgttctgcataacgaggtgcgatttcatcgaaaagtttttgaagagctgtttgtgaagtgtatttttcagtagcttcatcaaagttttcagatgcaatttcattacgtacgaaagcagctgcttgacgacgagcatgaagatcaccgcgtttacctaaagtaatcattttttcaactgttttacggatttctttagcacgagcttctgttgttacaatagattcgttaatcaaaagatctgttgttaaatcacgaagcattgctttacgttgtgagctagtgcgtcctagtttacggtaagccattttatcctcctatattatttatcgtttttgagtccgagtccaagatcagcaagtttaactttgacttcttcaaggctcttacgaccaaggttacggactttcatcatttcgggctcagttttttctgtcaaatcaaatacagtattgatacctgcacgtttaagacagttgtatgagcgaactgacaaatcaagttcttcgatggtacggtcaagcactttctcatcgttcactttctcagtttctttcattacatcagtgtttttagccacttctgtaaggtcagtaaagaggttcaagtgttcgatcaagacacgagcagaaagacctaaagcatcttcaggaatgattgtgccatttgtcatgatttcgattgttaatttatcaaagccatcattgctacctacacgagcaggttcaacttgataattaacttttttcactggtgtgtagattgaatctacagccaatgttcccactggagcatcttcttttttattaccctctgctgggacataaccacgttttttagcaacagtcattgtagctttcaaactgtgtccttcagcgattgtaaagagatagtggtcagggttgacgatttcaacatcgctatctgttaaaatatctcccgcagtaacttctgctgggccttcaacatcaagttcgataattttttcatcatcaacataagattttactgcaagtcccttaatattaaggatgatttgcataacatcttcgcgtacacctggaatagtgtcaaattcgtggagtactccatcaattttaattgatgttactgccgcacctgggagtgaagacaagagtacacgacgaagagaattacctagagttgtcccatagccacgttcaagtggttcaatgacaaatctgccgtaatctttattttcatcaatttttgttattattggtttttcaaactcaatcatttattatactccctcgaaacgaatcttgtgtactattaacaattacgattacacacgacgacgttttggaggacgagcaccattatgtggcacaggagtaacgtcacggattgaagtcacttcaagaccagcagcagcaagagcacgaatagcagactcacgacctgaaccaggaccttttacagtaacttcaacggttttaagaccatgttcttgtgcagattttgcagcagcttcagcagccatttgtgcagcgaatggagtagatttacgagaacctttgaatccaagagcaccagctgatgaccaagcaattgcattaccatgcacatctgtaatcataacaatagtgttattgaatgtagcgtgaatatgagcaacaccagattcgatgttctttttcacacgacgtttacgtgttggtttagccaatttttttacctcctattttattttttcttacctgcaatcgcaacagctttacctttacgagtgcgagcgttatttttagtgttttgtccacggacaggaagtccacgacggtgacggataccacgatatgaaccgatttccatcaaacgtttgatgttcaagtttacttcacgacgaaggtcaccttcaactttaattgcatcaacttcacgacggatagcatcttcttggtctgatgttaaatctttaacacggatatcttctgaaacaccagctgcagctaagattttcttagaagtagcaagaccgataccatacacataagtaagtgaaattactacacgtttttcatttggaatatcaactccagcaatacgagccattttttctcctttctataattatccttgacgttgtttgtgttttggatttgatggacaaattaccataacacgaccgttacgacgaataactttacagtattcgcaaattggtttgactgatggtcttaccttcattttttaatccctccaattatttcgattatttaaagcggtatgtgatgcgtccacgtgtcaagtcgtacggactcatttcaacagtaacacggtcacctaccaaaatacgaatgtagtttttacggatctttcctgatacagttgccaagatttggtgtccattttctaactcaacagtaaacattgcattaggcatcgtctcaacaactttaccttcgatttcaatcacatcttcttttgccacgcaaaagtaccccctaaatttcgatttgatgtcctctgagcacagaggtaacaattataagccagactagcctattatatcatgtcttttctacttgtgcaagtagaaaattcttaaattattttaatgatgagatagctttaacaatatctgcaaaaacatcatcaatgtcttggttaccttgaacgtcaaaaacaatacctgctttacggtaatgttcaatgattggtgcaccttgagcgatattaacatcaagacgacgttttaccgtttcaggtttgtcgtcctcacgttggtagaagtcatcttcattgtagtcaccaactggtggattgaatactttgtggaaagtttcgccagttttacggttgataatacgaccacttaaacgttcaataagtgattctgggttaacttcaatgttaatcacaccatctaatttaagatccaagttgctaagtgtttcatctaaagcgtgtgcttgttcaatagtacgtggatagccatcaagcaaaaagcctttttctgcgatgtcatcttgtgctaaacgttctttaacgataccgttcgtaacttcatctggtacaagttcacctttgtcgatgaatgattttgcaaggacacccatttcagttttgtttgccattgcagcgcggaacatatctccagtagaaatatgagctacaccaaatttttcaacaatttttgctgcttgagttcctttaccagcacctggtaaacccatgattaaaagattcatgatagtctccttattttatttttaaataaatttaacaccgaagtgctaaacttattcaaaaacaaaatagaaaggttgactaggtcaacctatattctattctgctgtgttcatgaaaccaacatactgtctcttcaaaagatagccttcaagttgtttcataccttcaatacctgttgaaatcaagataagtaagcttgttcctccaagagcaatactgctagataggttcattgcttgttgagcgataattggtgttaatgagataaacgccaagaaaattgaacccacagtagctaatttcttcaagagtgaagacatgtattcttctgtttcgcgtccaggtcgaacactaggaatatatgacgcacctttttgcaagttttctgctgttttttcaggattaacttgcacaaaagtatagaagaatgagaataaaatgattagtactgcgtaaactaccataccacttggtgtttggtaattcaagaatgattctagagtagttaaccaaggaatatctttcccatttgaaatcaacggaataatcgtacttggaattgttgtaatcgagctggcaaagataacgggaatgacgccggctggattaatttttaaaggaaggtaagaacttgtaggcgcaccttgaacaagttttgtatattgaattggaattttgtattctgcttgttggacaaaggttgtaaagaatacaattgccaatactgccacaatcaacaaagctacaaagatgtatgaagataataaatcacttgaacgtacattcacaaagaaatcttcataaattgttgagatagcatttggaatcgatgaaatgatacctgcaaagataatcattgagacaccattaccaaaacctttgtcggtgatttgctcaccaagccatgtcacaatcatactacctgttgttaacaaggcaccaatgagaagataagtcttaacatttggtgttgataccaatgaaatacttgaaagagtattaaatcctgctgtaataccaatagattgaacgaaagctaggacgagtgaaatatagcgcgttgcttgattaagcttacggcgtcctacttcaccttgtttactccattcgacaaatttaggtaagatatccatttgcaacagttgaacgatgatggatgctgtgatatatgggctaacacccatagagaatacagagaagttactcatagcattaccagaaacaaggttcaacatatttaagaagggaagctcccctaattgttcaagacttttcgcattgatacctggcacagtaatatgcgttccaatgcggaaaaccaagatgataaaaagtgtaaagaaaattttatttctaacattttttacctttagtgcatctttaagtaatttaaagaacatactaagtcctcctcattagatgacttcgattgaaccaccttttgcagtgatagctgcttcagcagattttgagaatttagctgctttgacagtcaattttttagtcaattcgccgttaccaagaactttaacacctgatttttcagcacggataattccagcttctttaagaacaactggagttacttcagtaccgtcttcaaagacgttaagttggtcaaggtttacaagagcgtattctttagcgttgatgttcaagaaaccacgttttggcatacgacggaacaatggagtttgtccaccttcaaaaccaagacgtactttaccaccgctacgagctttttgacctttttgaccacgtccagctgttttaccattaccagatgaagtaccacgacctacacggttacgtactttacgagaaccttctgctggtttaagttcatgaagtttcattattaattttctccttatttgtaaaatgctagcgcctctatgaggggaaaggactccccatagaaactcgcctatactatatctagtttaagtcgcaagagatttctccgcgacttaaacctaaaattattatgttaattatttaacatcttcaacagttaccaagtgtgaaactgcagtaaccattccacgaatagctggtgtatcttctttgataactgagctattcaatttaccaagtccaagagcagcaactgttttgcgttgtgcaggaatgcgtccgattggagacttagtcaaagtaattttaatttgagccattattatcccctttcttaagctaaatcagaaactgaaataccgcgaagagcagcaacgtcttctgcacgtttaagttgtttcaaaccttcaacagttgcacgaacgatgttgattggagtgtttgaaccaagtgatttagatgtaacatctgcaacacctgccaattcgatgacggcacgtacagcaccaccagcggcaaccccagcaccttctacagcaggtttcaacaatactttagctccaccgaattctgaacgaacttcgtgaggaattgttgtaccaaccataggtacttcgattaagtttttcttagcgtcttcaacagctttacgaatagcttctggtacttcttgagctttaccagtaccgaaacctacacgaccattacgatcaccaacaactacaagagcagcaaagcggagacgacgtccacctttaacaacttttgtaacacggttgatagcaacaacgcgttcttcaagttcaactgcattatctttaaatgccattattaagtgtcctccctattagaatttcaatccgttttcacgagctgagtcagccaaagctttaacacgtccgtgatagagatatccaccgcggtcaaacaccacttcagaaatacctttagctactgcgcgttcagcaacaagtttaccgacaacaacggcttgttctgttttagttcctttagaaacttctttatcaagagttgatgcacttgcgagcgttacacccgctacgtcatcaataacttgagcgtagatgcctgtattagaacggaaaacgttcaaacgtgggcgatcagcagttccagagagtttaccgcgaacgcgacggtggcgtttttggcggattttatttttatctggtttcgaaatcacaattttcacctcttaattaattgattaatgtcaaaacgacacattataaatgctagaacatgggctttgcaagagtaagtcttgcaaaatttcccacaatctattatttaccagttttaccttctttacgacgtacgtattcaccaacgtaacggatacctttacctttgtaaggttctggagcacgaaggctacggatgtaagctgctgtttgaccaacaacttctttgttgataccgttaacgacgatagtagttgcagatggaacttcaaatgaaacaccttctggagcttctacttcgtcttggtgagatttacctacagaaagtacaagttttgaaccttgaagttgagcacggtaaccaaccccgcgcatttcaagttcttttttgaaaccttcagaaacaccaacaaccatgttgttcaagttagcacgagctgtaccgtggattgttttcatttcttttgagtcgtttggacggtgaagtgaaacttcagtgccttcaactttgatttcaatgtttttgttaaactcacgagtgagttcgcctttaggtcctttgacagttactacgttatcattgttagtaacttctacaccagcaggcaagttgataactttattaccaatacgtgacatagtttttattttctcctgttagattgtcaagccgcatatgcgacgagttttcacggggcgactattatacagaatacctgtatctatagtccattatttttagtaagaaactttttcaataaaaattgaaaggaagttttatcttaccaaacgtaagcaataacttctccaccaacgttcttttgacgagcttctttgtcagtcaaaagaccttctgatgtagagatgattgcgattccaagtccgttaagaactttaggaacatcttcacgttttgcgtaaacacgaagacctggtttagagatacgtttcaagttagtgataacacgttcaccgttttgtccatatttaaggaatacacggatgataccttgtttgtcatcttcgataacttcaacgtttttcacgaaaccttcgcgtttaagaatttcagcaattccttttttgatatttgatgcaggtacttcgagcacttcgtgttttgcttggttagcattacgaatgcgtgtcaaaaagtctgcaattgggtcagtcataaccattatatatttctcctcttactagtagtttgaatatttcacttgctagttaatgtcgcccaagtgggctggttgtatgcttctcagacgaaaagctaatttgaactcgccctatgaagtgtgcaaaatagataaatcgactcgtttgcaagcaaacatcttcaacttcctaatttttctttgttcaccacgggcttagtatcataattttaccaagacgctttagtaacgcctgggatttgtcctttgtaagctaactcacggaagcaaacacggcaaagtttgaatttgcggtaaactgaatgtggacggccacaacgttcgcaacgagtgtaagcttgcgtagagaatttcgcagggcgatgattcttagcaatcatagattttttagccaattgatttacctcctaaattattttgcaaaaggcattccaaggcctttaagcaattcacgaccttcttcgtcagtgttagctgtagttacgataacaatatcaagaccacgtactttatcaacatcatcaaagttgatttctgggaagatcaattgttctttcacaccaagtgtgtagttaccacgtccgtcaaatgattttgttggaacaccgtggaagtcacgtacacgtggaagtgaaacagtaaccaatttatctaagaattcgtacatacgttcaccacgaagggtaacttttgcaccgatcgctacaccttcacgaagacggaagccagcgattgatttcttagctttagtaatcaatggtttttgacctgaaataagtgccaattcagcagcagctttttcaaggtttttagaattatttacagcatcaccaacacccatgttaagaacgattttctcaacttttgggacagccataactgaagtgtagttgaatttttcagtcaaagcaggaacgacttcgttagtgtatttttcttttaagcgatttaccattacttatactttctcctttccttcgtgattaatcaagcacttcgcctgattttttgttgtaacgaacttttttgccgtctacaactttgtaaccaacacgtcctgctacaccatttttgtcaagaacttgtacgttagacacatggattggtgcttctttttctacgatagcaccttgagggttttcgttgtttggtttttgatgttttttaacaatagcaacaccttcgacaacaactttgttgactttaggaagggctttaagaactacagcttcaacgcctttgtccttaccagcaataacgcgaactttgtcgcctttttttacaaacatttggtttttctcctattatttcttacgccctaatgggcaccctgcaaatgcaggggacttagtttgtgttttttattgattaaagtacttctggtgcaagtgatacgatcttcatgaagccaccttcacgcaattcacgtgcaacagggccgaagatacgagttccgcgaggagttttgtcatcacggatgattactgcagcgttgtcatcaaatttgatgtatgaaccgtctggacggcgtgcaccagatttagtacgaacaacaacagcttttacgacatcaccttttttaacagctccaccaggagtagcttgttttacagaagcaacgattacgtcaccgatgttagcgaatttacgtcctgaaccaccaagaactttgatagtcaagatctcacgagcaccgctattatcagcaactttcaagcgagtttcttgttgaatcatttcaaatttctccttttagtttgattagataataacagcttcttccactacttctacaagacggaagcgttttgtagctgaaagtggacgagtttccatgatacgaacgatatcgccttctttagcaacgttgttttcatcatgtgctttgtattttttagaatagttgatacgtttaccatagactgggtggttacgtttagtttcaactacaacagtgattgttttatccattttgtcagatactacacgtccaacaagggttttacgttgattacgttccattattagaatttctcctttcccaatctattatttcttttcagattgcactgtttttacgcgtgcaatttgttttttaacttcgttcaaacgagcagtttgatcaagttgacctgctgcagcttggaaacgaagatcgaaaagttctttcttaagttcgttttctttcttagcaagttcttcttgagaaagaccacgaagctctttaacaaaatctttaatttcttgaagtttcatgatttctccttattctgcttcacgtttcacgaatttagtcttaactggcaatttgtggctagcaagacgaagtgcttcacgtgcaacttcttcagatacaccagcgatttcaaacatcactttaccacgtttaactggtgctacccaaccttcaggtgcccctttaccagaacccatacgtacaccgatagctttagcagtgtatgatttgtgtgggaagattttaatccaaactttaccaccacgtttcatgtaacgagtcattgcgatacgggcagcttcaatttgacggtttgtgatccagtgactagtagtagcttgaagaccgtattcaccgaatgcgacttctttaccacctttagcttcaccgcgcatttttccacggaattcgcgacggtgtttaacacgtttaggtactaacatttgttatttgcctcctttagtgtttttacgagctggaagaacttcaccacggtagatccaaactttaacaccaagtttaccgtaagtagtgtcagcttcttcccaagcgtagtcaatatctgcacgaagtgtgtgaagtggaacagttccttctgaataaccttcactacgagcgatatcagcaccgttcaaacgaccagatacttgagttttaatacctttagcacctgcacgcattgtacgttggatagcttgtttttgagcacgacggaaagcaacacgttgttcaagttgacgtgcaatgttttcaccaacaaggtgtgcgtccaaatcaggttgtttgatttcaacgatgttgatgtgaacttgttttccagtcaatttgttaagtttagcgcgaagagcgtcaacattagctccacctttaccgataaccatacctggtttagcagtgtgaagtgaaacaattactttatttacagcacgttcgatttcaatacgtgaaactgaagcgtctgccaattctgtttgaatgaatttgcggattgcaagatcttcatgaaggtaatccgcgtattctttttcagcataccatttcgcatcccaatcacggatgattccgacacgcataccaattggatgtactttttgacccacgattttacctccttatttttctgacacaactactgtgacgtgagttgtgcgtttgttgattggtgaagctgaacctttagcacgtggacggaaacgtttcatagttggtccttcgtttgcgaaagtttcagatactaccaagttagctttttccaaaccaaagttgttttctgcgttagcgatagcagagttaagaactttttcaactacgcgagctgctttgtttggagtgaatttcaagattgcgattgcgtcagcaacattcttaccacggataagatcaagtacaagacgtgttttacgaggtgaaacacggactgtacgagccattgctttagctgaagtaatttctgccattgtgtcctcctcctattaacgacgtgttttcttatcgtcagctgcgtgacctttgtaagtacgagttggtgcgaattcaccaagtttgtgacctaccatgtcttcttggatgtaaactggtacgtgtttacgtccatcataaactgcgattgtataaccgatgaaacttgggaaaatcgttgaacgacgtgaccaagttttaattacttttttcttttcgtcatttgcttgagcttcaacttttttcatcaaatgctcatcgacgaaaggtccttttttaagactacgtcccattttgtagttttctcctttaaaatatagtaccacagcggcctgtgtgcaaaatgcacactaccgagctggcggatgattatttaactaagcgactgaattatttgtcgttacgacgacgaacaataagtttgtcagatttagcttttttgttacgagttttaagaccaagcgcaggtttaccccaaggagtagatggcgctttacgtccaactggtgctttaccttcaccaccaccgtgtgggtgatcattagggttcattacagaaccacgaactgtaggacggatacccatccaacggctacgaccagctttaccaaggtttacaagtgattgttgttcgttaccaactgtaccgattgtagcacggcaagtaccaagaatcatacgaacttcgcctgattgaagacgaacaagcacgtatttaccttcttgaccaagaacttgtgcagaagcaccagcagcacgaatcaattcagcacctttacctggttgaagttcgatattgtgaataactgtaccaacagggatgttagcaagtggaagagcgttaccaactttgatatctgcatctggacctgaaacgatacgttgaccaacttcaagacctttaggtgcaaggatataagctttcacaccgtcagtgtagtgtacaagagcgatgttagctgtacggtttggatcatactcaatagtttttacaactgcttcaacgccatctttgttacgtttgaagtcaatcaaacggtagtgacgtttgtgaccgccaccttggtgacgtacagtgatgcgaccgttgttgttacgaccagctttgtttttaagtgaaacaagcaatgatttctcaggagtgcttgtagtgatttcagcaaaatccaaagaagtcatattacgacgaccatttgtcgttggtttataagctttaatacccacgttatttcctccttagattattcagcttcagctgcaaacaactcgattgctttagaatcagctgtaagagtgatgatagcttttttagtttttgaagtgaaaccagtgtaacgaccaacacgttttgcttttggtttaactgttacagtgttcacgtttgcaactttaactccatcaaaagcagcttcaacagcttgtttgatcaaaagtttgtgcgcacgagagtcaacttcgaatgtatatttacctgcttcgaggtcgtacattgatttttcagtgattactggttttttgattacgtcgtacaaattcattatgcaagaacctcctcgattgtagagattgcttctttagtaacaagaagtttgtcgctgtttacgatatcaagaacacttgcagttgttgcagttgcaactttaacgtttggaaggttacgtgcagaaagagctgcaaattcgtttccttcttcaaggattacaagtacttttgagtcaacgttaagagctgaaagtacgtttgcgaattcagcagtttttggagctgcaaatgaaaggctttctacagctacaaatttatcttcagcaactttagctgagtaaactgatttcaatgcaaggcgacgaactttttgtggaagtttgtatccgtatgaacgtggagttggtccgaagactacaccaccaccacgccattgtggtgagcggatagaaccttgacgagcacgtccagttcctttttgacgccatggtttacgaccaccaccagatactgcagagcggtttttaactgcgtgagtaccttggcgaaggctagcgcgttggctgataacgacatcaaatactactgattcgtttggttcgataccgaagatagcatcgttcaactcaactgagctaacttctttaccagtttggtcaaatagttttacgtttgccattttaactgttttctcctttcttattatttagcagccttaactgctgatttgatagtgataagagatttcttagcacctggtacgttacctttgataagaataacgtttttctctgggataacttggacaacttcaaggttttggattgtcacacggttaccacccatacgtcctgccaagtgtttgtttttgaaaacacggttaggcgcaacaggtcccatagaacctggacgacggtgataacgagaaccgtgagccattggtccacgagcttgaccgtggcgtttgataacaccttggaaacctttacctttagatgtaccagttacatcaacaacatctccagcttcgaatgtgtcaactgtgatttcttgaccaacttctaagccttcaatgtttttgaattcacgaatgaagcgcttaggagctgtgttagcttttgctacatggcctttggcaggtttgttgctcaatacttcacgtttgtcatcaaaaccaacttgaactgcttcgtaaccgtctgtttcaacagttttcacttgaagcacaacgtttggagttgcttcgatgacagtaacagggataaattcaccagattcagtgaagatttgagtcattcccacttttttccctaagattccttttgtcatgagagaatatttcctttactttatttatttaaaaagtttttaatgagcgtttttcatgctcaaaaaagtttttaacgagcgttttttgtgctcaatcatcaaatccttattagagtttgatttctacgttaacaccacttggaagatccaatttcatcaaagcgtcaactgttttttgagttgggttgatgatatcgatcaagcgtttgtgagtacgcatttcaaattgttcgcgtgaatctttgtatttgtgagtcgcacgaataactgtgtacaagctgcgttcagttggaagtggaactggtccagcaactgttgcacctgtacgtgttgcagtttcaacaattttttctgccgctgtatcaagtgtacgatgttcgtatgctttcaaacggatacggatttttttgtttgccatctttttctccttttcgtctatttaagataataggctagctcctcaagaaaaccaacacgcttttgcgtggcaatgcaaccgagcgtgtcgcaacctcttgtatcatagctaaagttactgtatttacagcaccagtatataatatcagatttgacaagagtttgcaaggtttttaccgtgttttttagctttttttccaagaaaatgttttcaggtactaccaacattttaagcattaacaaaaaaatcaggcaatcacctgatttcttacatatataattagcaaaaagcactctaataggaagaaactatctttggaataaaaagatgttatttatttcctgattctagaatcaattttttgaggacgggacctaataaaaagatttgaattgaaaatgccattggaaaattaaacgttagcgtggttaaaaccgttggaatgaaatttccccatggatgcttaaataaaatagatgaaacaaccgccatacttggacacatcacacagactgtgcaaattcttcgtatcgttggtcgcatgaacgcaggaatttcttcaggctttgccagcattgacatcaagcgaactgcaattggtccaccgaagaattcttgaatgagaaaaacgatgattgtaatccaccacacttctttcaatacgtccaaaactaaaccataattggcaccgccgttattaagtgataaattgtaatattccatgcaaaaactcatagcaaatgccattgataaagaaaagacaaactctcttgttttacttactttcatttcttccctcctcataacttatattacctaaaaataaaatcggaaacaattccgtttttagagcaatctattcctaaaatgaataattttcaacaataaaggagtgggcaaaaccactcctctatcgttgaacaaattctaaaaagtgactggctgcttttgataacagggcacttttcttataataaatgacaatttctgtctcgatatgcggaagaacaggcaccagtttcaccagatttcgcgtattgatataggaaataggttttgccattaataacgaaatgcccattcctttactaacaaggtcgataatattttcagcacgctttcccgtataagcaattgacggcgtaaagccagcttgacgacaagcttgaagtgaaatgttatgcatgacagaatgaggaggtaagaataaaaattcttcatttttcaattccgacaagtcaatcagagcttggttagccaaggggtgatcatttggtaacaccgcaaccaaataatccgtcgtgaaattgattactgcaaaatcatccaaatcctctgtaacttctttttgacctgacaatcgacgaataaaaatcaaatcacagtcatcatttcgaagtttctgtttaagttgctcagtctcaccttcaataatgctcagattaatttttacattcgcctttttaaaatcaatgagcatatctgtgatgccataaggagccataattggaattgagccgattgtcaaactttgctcttcagcttccttgagattaataagcgccgtattacattggtgctggacatcaattagctgttgagcgtatttgagaaatacttttcctgcttcattgagtttaacttgacgtgtcgttcggtcaaatagagttgttccaagttcaacttccaaagattttatatgttttgacaagctagattgcgaaatgaataaattctccgctgcttctagataattttctgtctttgttaaggcaataaattctttcacatgattcagttccatagcgttacttcctgaaataagttctttattttagcataacaaaaatcacaaaacttttctaatgattattttttaaattaggttgtgtcaattgcttcatatatttcttgtaaagggaatataggaaaagccaacggaaaatattatccgccaatgttgccagccaaacacctgtcaaaccaaggtttaggctaactcccaacacgtaccctgaaataattcgaatgacccacattccaaatgttgtggcgtaaaatggaagttttgcattgcccaaaccttgccacgctgctgtgtaaataagtgttcctgctgttgctggaccgccaacaaaagaataaaacaacacaacaaggctagctgttagcgctgtttgattggtcgtgaaaagataagtcaaatgactaccaaatacgtaaaccaaagcaccgacacaaagcatcataatcgtcgaaatcaaatacgaatcacgtaccagctgtttaatatctttggtatttttttgtccaagactatgtgcaacaagaataacggttgctgtcgcaacacccattcctggcatgtaattaaactgcgtcaaggtttccccaatggcatttcctgcaacgacttccgtaccaaatttgacaataatcgcaacgataaccacatcaccagcacgcatcattagacgttcaccagccgcaggcaaggctattttcaacaaatcactatccaaatgccattttatcgtttttaaaatattgcccattggcaattgacttgctaacaacaacgtaccgataaaacgtgacaagaccgttgagcaagcaacaccagcaataccccagtgaaaaacaaaaacagataccgcagaaaaaatcgcatttaaaacattgctcaataaactaacatacattggtaactgtggtttgcctaaagcacgcaaaaacgcgctcagcgttgtcatcaaaccaagactaacaatcaaaccaccaacaatcgccaaatacagaccacctgcttgtgtgactgttgtttctgttcctagccaatgaagaattgtttttccaaaaagcaaggaaaaaagccctagaactaaactgagacctagtgttaccaaaatcgcctcagactgatattgcaccgtcttttcattatttttttcaccacgacttttagctaccagacttgaaaccgcagctccgagagcaatgaaaacagcttgataaattgtaataatattattagcaacagagacacctgaaacggcaatcaacccaacctgagcaacaaggtagttgtcaaccactcccatcagcatctgcagcaaattttccatcatagcaggaaaagccaagtgaataattttctttgtttgtttcatacccttatcgtaacagaaagaaaagctgagaaccagcctcagcttctacttttataaatttaaagtcctaaataattttcaactgctttttgcatatcacctgttgccacaaccgttttgtgacgaacctcagctgtttcaagtccattgacagcttttggaatggcaacacctgataatttttcaagttccttaacagcaacaaaatcatctgcaggtgcttgtccactaactgcttcaactgccacacgtgggaatttatatggacttgctgttgaagcaatcacagttggtgttttatcacctgtgcgctctgcgtatttttgataaacagctgacgcaactgccgtatgtgggtcctcaatgtaatcagatgcttcatagacacgtttgatttcagcagacgtttcaacttctgttgcatagcctgcttcaaataaatcaagaatcgatttgtcaacatcaggaagtgtgtattcgccttctgaaaccaattgttccatcaatactttcgtcttagcagcatcatttcccaacaaatggaaaatcaaacgttctaagttagatgataccaagatatccattgaaggacttgttgtgactttaaactcacgttttttatcataagtccctgttgtgaagaagtctgttaaaactttgttttcatttgaagcacagattaatttaccaactgggacaccgatttgacttgcgtagtaagctgctagaatgttaccaaagtttcctgttggaactgtaaagtttactttgtcgcctgctttaatatgaccagctttaacaagttgtgcataagcataaacataataaacaacttgtggtaccaaacgcccaacattcattgagtttgctgatgaaaattgtgtcttgtgcgcaagcaatttttcacgcaaatcaacgtcgttaaacatacgttttacatctgtttgcgcatcatcaaagttaccagtaatggctacaacgtgtgtattatcaccagtttgtgttgtcatctgaagctcttgaattttgctgacaccgtcttttggatagaaaacaatgatttctgttcctgggacatccgcaaaaccagccattgcagctttaccagtatcacctgatgtcgctgtcaaaatcacgattttgttatcaacgccttgttttttagctgacgttgtcaaaaggtatggcaagattgacaatgccatgtctttaaacgcaatagttgacccatggaaaagttcaagattatattggtcacctaatttaaccagcggtgcgatttctggtgtatcaaatttagcatcgtaagcagaatcaatacagtaagccaactcttcttctgtgaaatcgtctaaaaatgcagacaatacaagcttagccacttcttggtaagaagcgtcttttaaagtttcaaaatccaatgccacttctggaagtgagacaggggtaaataaaccaccgtcagttgccaatccttgtaagatagcttgactagcagttactttgttattttcatcacgagttgattggtaaattaacgtcatcacaaattcctcatatatatagatagtcttttgtctattttaccataattatcagaaaatttatacaaatttatgacaattatcgaaaaaagcacccgtacaggtgctttagtttcttattttccccaacgtgaatcaacaccagcaatagaaatccagacgcttgccaagacgtcgtagaataaatcagccaactttttctttctcctttcttctcacgttttatgtcacctgtattataacgcttcaaacctatactgtaaagggatttttaaaacttttttgatgttattatttcttacataaaatgatagaaaattggcgttttgaacaagaaaaaaccaaccgaagttggtttctgaaacaaactaagaatccgattctcctttggctggatttttagcggatttttcaattgctttttgaatcgttttaacataaaggtctgcaccagtcgtatcactatcactgtaatgcacgccatcagtaccactccagatttctgggtgtttagttgctgctttataccaatctgccaccgtaacataattataagtatcagccaaagttagctcataatcacgaacttctttgacttgagcttcattattagcattgtaaggtgtcacaataatcaaacgatagccatctggcagagcatcaataaactgctgcaaatcttcttggtaattatctaacgaattaacccccaccgcaagaactgttgtttgcgataatgttccgcttgaaatttcattttggaaaatctcaaaagcatcatcaaagcttcggctaaccgcagcgtcaacttgagcatctggaagtaagcttgaaaatgaagcacttgagcgaagagctacggaatctccaatgacagtaacatcacttaaagccgttgcatccccagcagttacagtatgtgtccgattcaaattagtctgtgcttgctggagcgaattcaccaaaagacttgtctcaaaatcaccaacagctggagaaatgataatggtcacaattgtcaccaaaccaagcaaagctcctccaccataaagccatttttgataaggatgtaaatctaaattcaagccaagcaatttgacagacttgccagcaagaaatggctccaatacataataagacagcgttgaaaatatcaatgaaaagataaccgttaccaataccgctaaaccatttgacatgagttgtgtgaagataatgtaaaatggccaatggaaaagataaacaccataactaacatctgccaaatagttgataatagcgggctctttggcattaggtgtttggtcatttagcacacgcgccgcataaatcatcaccgttgcaaataaacttgctaatacaaagccaaacaaatacgtgattcgttggtcaaatttcaaagcaaatgtcaacagtagcaacaaagcaaagcttagcaccattgtcaaaatactgcgttttgttgaccatagacgaacattctttttgaaacgagccgttgtttctcgaattcctgtcatcgttgccaccatggctcctaagaaaaacggaaaactatgggacagagatgaaaagtaaattgtcgaaacgttgtcaacaaaaaatgctcggataaacattgataggaaacttccagcaaaaaatgctgcagaaattgcaaaaatcaaactacggaattttgctacgttatcatggtgtttccccaaaaaccaaaccaaaaatccccaaatcaaataaaaatgcatctcaattgccaaactccatgtatgaacaaagagatgtggaataaattgcgtttcgtagttaccacctgtgataatttcataaaaattcgttgtaaatcctactgctgccgcaatttgactgccaatgcttgccacgtagtctttacgtaccaagtaagtaaacggcataacaataagaatcatcaacaccaacggaggcacgatacgataaaaacgcctcttgtaaaatcctaaaagatcaattttcttgtttttcgaatattcatcaatcagtaaagccgtaatcaaatatcctgaaaatgtaaagaaaatatcaacaccaataaaaccgcctggaaaagctgttttaaagaaatgatagagtaaaacgagcaagagccccgtcaccctaaccattgaaaaccattttattctcatttttgaaaaatcccctgtttaaaggttcctgtatatacctctccattttgcgctgtcaaagttccttgaccgtctggctgaccatttttaaattctccttgatatgtccaaccagaatttgaggtaaaagttccttgaccttcaaaaacaccatccacaaaattaccttcataggtatcaccattttcataagtcaattttccctgaccattcatacggtgattaacaacatagcctgtgtaggttattttaccattgtcgtaggttaacgttgtttcagatttcattgatagcgtaaaaacggataaaccacagatgataagaatcaaaaccgttaagagctctatgcgccctcgggttatttttatttttttcatttttgctcaacttctctttttaagaattttttagccgcgttagccattgttcacaaccacgcttaaccaaatcataggtcgcatcaaaatcacctgtaaaccaaggatctggtacaccaccttttacaaaaagaaagattttgtcatcatactttccttgtgacatatgtttcaaatctgcaacattttccgcatccataccaataataacatcaaaatcataaaaatctttgcgcgaaatctgttgagatgacttgtgcttgtcgtaactaatgttatgttttttaaaaatactttgcgttccatgatgaatgggattaccatgttcccagccagaagttgcacggctttcaataagccagccttcagtaccagccaaatctttcatcacaaattcagccattggactacgacaaatatttcctagacaaacaaaacatacttttttcattttctctccctacgtagtcaataactcatttattaaaaacttcttttatcattataacaaaaaatagagccttatcacacgacaaatactctaacttctatttttatttttaagaaaaaattaaggcacccgatttacaatataaacaatcctaaaacttttctttttcataatctcctgaaagggctccgctagcggggttctttcttttttatctctaaaatcgttgcacaaaaaatcccaatctcaaatagattaggatttgcaggggtatgaaaaaaagtttatttaggagtatctttagtatagggtggcttgcttaagagagactgaaaattttctttcagaaaacttaaaaagcgcctcaaccaatttggctaaggcacttgctattatattattaactcttaatcttaatgacggaagtgacgaacacctgtaaataccatggcaatgccgtatttatcagccatatcaatagattcttggtcacggactgaaccaccaggttggatgattgctttcacacctgcagcagcaatttcttcaacgttgtccgcaaatgggaagaaggcatcactagcaaggacagcaccgtcaagacggtctttggcttgatcaagagcaatacgaacagaagctacacggtttgtttgaccaggaccaacaccaagtgtcatgtggtcatttgtcacaataataccgttagatttcacgtatttaatagctttccaagcaaattcaagcgctgttttttcttggtcgtttggttgacgttttgttacaactttccaatcagctggattttcttcgacaacatcttggttttgaaccaaaagcccaccgacaacaccagtgtattctttttcaacttggctagcctcttgagcttcaaatggcaattgaagaatacgcaagtttttcttcttagttgtcaagatttcaagggcttcttctgaatagcttggtgcaatgatgatttcaaggaaaatagcgtgcattttcttagctgttgcggcgtcaacttcacggttaagcacaacaataccaccaaagattgaaactggatctgattcataagcgtaatcccaagctgtttcaatatcatcagcttgtccgataccacacggattcatgtgtttaagggcaacaacagtcggacggtctttgaaatcacggataatgcggattgcagcatcagcgtcgcggatgttgttaaatgacaattctttaccattcaattgtttagcagaagcaattgagtaatctgttggcaaagctttttggtagaaatcagcgtcttgttgaggattttcaccataacgcattggttgtttcaaatcgtaagtgattgtgagtttttcaggttttgtttcaccaacttgttttgtgaaatattctgcaattaaagcatcataagctgctgtatgacggaaaacttttgctgccaaacgttgacgagtttcaaagcttgtttcaccattagctgacaattcatccaaaacaacagcgtagtcagctggatcaacgacaactgttacactagcatggtttttagcagcagagcgaagcattgaaggaccaccgatatcaatattttcaaccgcatcagcgtaagttacttctggtttcaagattgtttctttgaatgggtaaaggttaaccacaacaagatcaatcaattcaatgtgattatcttttgcagcttgaaggtggctgtcaaggtcacgacgagccaaaagaccaccatgaatatttgggtgaagtgttttcacacgaccgtccatcatttctgggaatccagtcacatcatcaatcgcgatagtgtcaacacctgctttatcaagcgcaacttttgttccaccagtcgagataatatcccaaccaagttttttcaattcttgagcaaattcaacaatgcccgctttatcagaaacactaattagtgcacgttttgtcatttcagtcctactttctataaaaaataaaccagtcaatcataataccagcaataagcccaatagcataagctaaactaagacgccatggattttcaagattgccaaatagtacatttactataaaggcaacgacaataaaagttaatacaaacaccaaaatctttttcatcatcataatctcctaataagctagcattgccaatagctatgctatcaaatgcgctgactactttttctcaactcctaagctctctaaaacttctgggtagagtttatactcattttcatgaatacgagcttcaaaactgtcaatggtatcatcagccagacgaggcacacggacttgtttaatcacttttcccgtgtcaacgccattgtcaacccagtgaatggtaacaccagactggtcaacacctgcttcccaagcatcatcaataccatgagcacctggaaattctggcagataagctgggtgaatattgatgatacgatcttcgtaagctgctagcaaagtcggaccaacaatcttcatataaccagctagacaaaccaaatcaatatcatatttttcaagcaaagcaacaatagcctcttcgtaagctactttattgtcaaactctttaagttcaaaagcatgagctgtcacaccaagtttttctgcacgttctaagacatatgcatctcggtggtctgaaaagacaaattcaactggaaattgctccgcaatgacttgaaaatttgacccattaccactcgcaaaaactgcgatttttttcattatttaatcaccacacttgcatcagcttttttaacaatacgaccaagttcgtaaactggttcgtcaagcaattctttcacgcgctcaaccttatcagggctaactgccaacatcaaaccaatacccatgttgaagatttcaaacatttcttcgtgtttgatgttaccgtatttttcaagagctttgaaaattggaagaacaggaactttatcttcttcgatttcagcagctaaatcatccgcaaacatacgtgggacattttcaataaaaccaccaccagtaatgtgagcaataccgttaaccaattcttctttgataagtggaagcaccgctttaacgtagatacgtgttggttcaagaagaacttcttttaattttttgccttcaagttcaggaagcacttcttcacctgtgtaatcagcaaagacacgacggacaagtgaataaccatttgagtgaatcccacttgaagcaagtccaagaagaacatcaccatcagaaacttttgaaccatcaatgatttgtgatttttcagcaacacctactgcaaaaccagccaaatcataatcatcttcaccatacataccaggcatttcagcagtttcaccaccgataagagctgcaccagattgaacacaaccttcggcaacacctgcaacgacttgttcaagttttgcaggttcatttttaccagttgcaatgtaatctaggaagtaaagtggttccgcaccagctgcaatgatgtcattaacacacatggcaacacagtcttgaccgattgtatcgtgtttatcatatttaatggcaagcatgagttttgttcccacaccatcagttcctgaaatcaaaacaggttctttcacaccagtttttgtaaggtcgaacataccaccaaagccaccaagagctcccataacacctgcacgttcggtacgcgcaacgtgttttttgatacgtgcaacaacttcataacccgcttcaacatcaacaccagattgagcataagcattttttgtcataataattttccttctctttttttgtcaaaaaaccattttggagattgcgacgttttttcagtcaaaccatcattttgactgaaaaaactagtcaggtctttagctttggtcccataggacaaagcgtccactgacaaatgctttagcctttagtcagtggtaagacgtggagcgtaagcattttttgtcataataattttctccttttgggaaatagctgagctattaaacagttctatttattttcattaacttcatgaatatagaagcttgttttttcttctaagctcttgaggtaaggttcttcgtaatcgtaaagtggtgttggatacttaccgtcaaagtaagccacacacaaaccaccattaggcgcatctgtatcaagaccgattgattcaatcaaaccgtcaattgacaagtaagtcaagctatcagcaccgataatctcacaaacttcatctttagtgtggttagctgaaatcaattcacgacgattttgaatatcgataccgtagaaacatgggtatttcaattctggactaccgattgccacatgaacttctgtcgcaccagcttcacgaagcaaacgaacgatacggcgtgatgtagttccacgcacgatagaatcatcaaccatgaccacgcgcttacctttaacaacaccagatacggctgagagcttcatgcgaacaccttgctcacgtaactcttgtgtcggttgaatgaaagtacgttgtgtgtactgatttttcaccaagcccatttcatttgggagacctgattcttcagcaaatcccattgctgctgaaagtgatgaattcggtacaccaacaacaatatcagcttcatgttgaaattcctgtgccaaacgtttccccatatttttacgagccgtgtgaacattgacaccataaatatcactgtcaggacgtgcaaaatagatatattccattgaacagatagcaagctgtgtatcatttgtgtaagtgtcatactgaatgccattgtcatcaatgataacaagttctcctggttttacatcacgaacccatttagcaccaaccacttcaaaggcacacgtttcgcttgatactacccaagcaccatttgccatttgcccaattgacaacggacgaaaaccatttgggtcaagcgcagcaatcaatttatcttctgtcatcaaaagataagcaaagccacctttgacagtgttcaacgcttctttgactttaccgataaactcaggattatggctacggcgaatcaaatgcattagaatttcagtatcagatgaggcattaaaaatcgccccttggtcttccaattcttttttcaatgatactgcatttgtcaaattaccattgtggcaaagcccaaattgctcgtctgtaaagttgtaaagaaatggttgaatgttattaatagacgcagagccagcagttgcatagcgaacgtgaccaatagctgcagttcctgttaatttttccaaatcagcaggatttttaaatacttctgaaagaagaccagtattacggtgctgaagaagtttgccgttatcgtttgtgacgataccagcaccttcttgaccgcggtgttgaagactgtggagtccaaaataagtcacttgagctgcttgagggtgcccccaaatcccaaaaacaccacattcttcatttagagatttaacttcgtatgtcattatttttattacctagaactaaattataaggaattttttctccttttgataagttgacaaaagaggctgagacaagcctcagctctcttgcctatgtatttgtatttagaatttcaagacgcaatcgcagtcatgtcatttctataaaatatatttttaaaaatagtactaccctttagtaaaatattcaacagcgctacggaacaagtgttggtctttatttcctggaatattttggaaaagaccgtcttcgtaacgttctgaatgtcccattttaccaatgatttgaccgttcttacttgtgataccttcaatcgcattaacagaaccgtttggattgtatttagaatccatacttggtttaccgtcaaagtcaacgtattggctgaagatttgtccattatcacgaagttctgcaaattcttcatctgttacgacaaatttaccttcaccatgtgatactggaatagcatgaacgtcacccacttcaacacctgcaagccaaggtgaattcgtattggcaatacgtgtttcaaccattttcgccacgtgttggttagcatcattgtagaaaagagttgggcttgtttcagtcgcatcttcaaagttaccatatggaagaagacctgatttcacaagcgcttggaatccattacagataccgatgataaggccacctttttcaataaagctgtcaatagctgcgcggactttttggttcaacaagatattgacaatgaatttagccgaaccgtctggttcatcagcagctgagaaaccacctgcaaagaagatgatgttagctttactgatattgtcaaccattgtatcaacagatgcttcaatagctgcttcatcaagtgttacaaatggtaccaagttaacttttgcacctgcttgttcaaaggctttagctgaatcgtactctgagtttgtaccagggaatactgggatgtaaaccaatggttcagcaactttttcacttgctttaatcactgcatccgaagcaactgctggaacatcttcaagttttgtactctgttcaaattcagttggataaacatcttcaagtttgccctcaaaggctgacaaaagtttatctcctgcaaggttgacaccattgacagcaagtgtaaagtcagctgttgtttcaccgattttgctaacttcagcaatttcttcagtagatgtaaagataaagccaccgagttgtgctgtcaagctagttgcaagctctgccaattctactttagctccgatatggttaccaaaagctgcaagtgccaagctttcaatcacaccaccatatttaacagctgaagctgatgtgatatggtgtgctttttgaatcgcttcaaatttagcaaaattagctttaatcaaatcaaaatcaatctcttgtgaaatagcttgccctggaatgtagtaaatgtattcaccagctgctttaaattctggcgaaagaacattacgactatcagctgttgtcacaccaaaagcaaccaatgttggtggtactgtcaattcttcaaatgtaccagacattgagtctttaccaccgattgatggtaaaccaagttgcaattgcgcttcgattgacccaagaagggctgagactggttgtccaaagcgttcagcttgtttatccatacgttggaaatattcttgataagagaagcgtgctttagaccaattcgcacctgttgccaccaaacgcgctgttgcttcaataacagcataagctgcaccatgatatggtgaccattcagcaatataagggttgaacccttgtgccataactgacgctgttgttgttacaccgttttgaacaggaagtttttgaactgaactttctgttggtgtgatttgataacgaccaccaatcggatggttaaccgttgaacgaccaacagagctatcaaagatagtttgtaaacctttttgactagcgtgattaaggtcagaaagaacatttacagtatcagattcaagtgtcgcagctgaagtggtacgttgttctggcatgtcaacttgactgtcaacaacattagcatcaaccaccacgcgcacaccgtttgtatcaaggaaacgacgttcaatatcaacgattgtttgaccattccaagtcataacaagatttggtttttcagtaactgtggcaaccactaccgcgtcaatattttctttatgacattctgccacgaaagcctcaacatctttcggacgaaccacaacagccatacgttcttgtgattcagaaatggcaatttcagttccattaagtccttggtatttcaaaggcactttgttaaggtcgatttcaagaccgtcagctaattcaccaattgccacacagacaccaccagcaccaaagtcgtttgattttttaatgaggcgagtcacattaccattacggaaaagacgttgaattttacgttcttcaatggcattccctttttgtacttctgcaccagctgtttcaacagattcaaccgtttgaactttagatgaaccagttgcaccaccgacaccgtcacgaccagttttaccaccgagaagaataaccacatcaccagcttctggtttctcacgaacaacatttcccttaggagctgcaccgacaacggcaccgagttccatacgtttagcgacgaatcctgggtggaaatattctttaacataagttgtggcaagaccgatttggttaccatatgaagaataaccatgtgccgctgttttagaaatcacttgttgtggcaatttaccaagacgtgtttctgaaattggtgttgtaatatcaccagcacctgaaatacgcattgcttgataaacataagaacgtcctgacaatgggtcgcggattgcaccaccgatacacgttgcggcaccaccaaatggttcaatttccgttgggtgattgtgtgtttcattcttgaacatcaaaagccatggttctttaacaccgttcacatcaacttcaatttcaacagaacatgcgttaatttcgtctgacacttccatatcgtccaagcgaccatttgcacgttcataacgaccaaagattgtcgccatgtccatcaatgtttgtggcttttcagaacgtccaagctcatcacgcatagcaatatatttatcataagttgcctgtaattgtttttggaatttagacgctgagaaatcaatatgtttaagctcagtttcgaaagttgtgtggcggcagtggtctgaccaataagtatccaaaactttcaattctgtttccgttggcacgcgcccaattgatttgaagtactcttggataaagacaaggtcatcaacttccatcgccaaaccttgttcagctttataatcagcaaattcagccgctgtataagtcttgaagaaatcaagatttggaatcgttttgtctgattctgaaaatgcttgtggcgcaattcctgttgtaatatctttaaaacgagaatctactggattaagaagataattcttaaccgcatcaagttcagcagtatcaatatccttgttaacaagataaagttgagccgtattaactgttacatcattactgctgccaagaagaagcaatgcttcttgtgatgacgctgcacgttggtcaaattgacctggaagtgattcaatagcaaagaaagcatagttagaaagttcagcaaccacatcactctcagccaaaatattatccgttacttgttcagaaaaaatgtgtttttcagcacgttcgaaaagcgaatctgctaaattaaaaacatcgtaaacttgaataatgcgtaaatcagtcaaacttgttaattgaagattgtgtttgagttctttaacaagcgcctgagccttaatgttaaaatttgattttttctcaacgaaaattcgtttattcattttttaccctttttagaattcttctttctacttaattagaaatcacagtttttagttaagccctttgagtttttcaaggacaacttcgtaaacatctgtcaaactacctaaatcacgacggaaaacatctttatccatgtgatgaccttcagcatcccaaagacggcagttatctggtgaaaattcatccgcaagaataattttgccatctttgtctttaccaaattccaatttgaaatcaatcaaattaagaccaatttggctgaaccaatctttcaaaagatcattaatacgacgtgtttctgctttgatataagcaatatcttcatcacttgcaataccaaggaattttacgtgttcatcattgataaatgggtcatccaaatcatcatttttgtagtaaaattcaacgattggagtatctaatttgattccttcttcaacaccaaagcgttttgagaatgaacctgcagtaacattacgcaaaacaacttcaagtggaacaatatcaacttttttatttaattgttcggtttctgacaattgtttaacaaagtgagtcgccacacctgcttcattcaatttcgtaaaaattaaagatgagatttgattattaagaacgcctttacctttaatagtctctttacgagcaccattaagcattgtcgcttggtctttatagactgaaataatcaaattctcatcttctgatgtagtgtaaatatcttttgcttttcccgtataaataagttgtcgtgacatgtttttgttcgcctttcgcttttattctactaaattttaacacatgatgttaccaatttcaacatttagcagactttttaacgaaataaaaataaaaacgttcgaaattaacgaacgtttttgattaatttacgcgattatagagatattccatcatttctcccatacatttcatgttttcaacatcttcgtcagggatttccaaatgaaactcatcttctaaattgatgataaattccattaaggcaatcgaatcaactcccaaatcatcatgtaaagttgtcgtttgagtaatatttaactctggtttatgcaattgctccttaataatgaagcaaatcctttcaaaaatagcctcttttgtcatctcttcctccccttgtttaatcctttggtgtgaaagcttctactaattgaccaaccacattcgtttctaacattgtacgaacttgtctgattgtatagtaaacagcttgcgcatcgcttgaaccatgacatttcacaacaggcgctttaagcccaaaaagaactgcaccacctgcacttgaatagtccatagtaccttttaattgatataaactatccttcaaaagaagggctcccaattttgctttcaaaccacctgatttaatagaagatttcaaacctcccatgatgttaagagcagttccttccattgtttttaagacagcgtttcccgtgaaaccatccgataccacaacgtctgcaacaccattcatcaaatcacgcgcttcaacatttccgacaaagttcaaagaagcatcttctgctaatagcgcataagcttctttatgaagtggatcacctttcgttgcctcagttccgttattaagcaaaccaacacgtggcttagcaataccacgaacattcttcgcataaaatgaccctaaaatagcatactgatgtaaatgtttaggggtattctcagcattagccccaaggtccaacatatcataccctttaccatcgagtgttggcaaagtggacataagccctggacgatcaatacctttaatacgcccaacaacgaatagtcctgccgcaaggagcgcacctgtattccctgctgaaatgacagcatctgctgtcccttcttttacagcttgtgccccaagtaccatgctagctttcttcttacgacgaatagctttagctggttcatcatctgaattaattttttcttctgtatgaataattgaaacacgctctgttgcagtcaagtactcttttatcttagattcatctccataaagttgaatttcaatatctgagaattctgctaacgcacgattaactccttcgataatagctttaggggcattgtcgccacccatagcatcaacagcaatttttttcatatcaattttttcctcacaaaacattatcacttcattatagcatgattcccgatttttttcagttccagaaaatatcacaataccttttcaaaaagatgtcttctcaatgacacacctctaaataaaaagctgttagtgctcactctacaaatcaagcagcactaacaaccattatttcataatatttccccaagtccctaaatcatcaatgaattttttacttttcaaacgaagaccgacataattatcataaatatcatcaataaataaacgcaattttcgtttcatctcaggcttaactgaaatcgtctttaattcatcaaaatgaatggcttgaaatcggtccaccaggtacagcacattcggatcaagatgactacgataatcatctttaccataatgctctggacaaagcagaccagaatatttgtgcgaaaagtcaaagggcaatccaacccgatgacaaaaagcacactcatgaaaattaagactaacaccaaatcgttctaaaagttgaatctcaaaaatattagtcaaaatttcgtagtcaagtccctcttccattaaggaaagcgtcttattaacaaatgcaaacaactgcgggtctgccacaccatctggcacagctgcatccgccaatgctgtcacataagaagcataggacaacttaaacaaatctgcattaatttccttaaaagactcaacttccttataatcttcaatgaaagacagacctgtatcattaatttttaaaataaattttgccaccgttaacggctgaataacagaattaaaccgagatttaccagcatgtttaacaaaaaacatatgctttccattggtttctgtaaaaattttgactagcttatcatcctcacgataattacgattatagaggacaagaccataagtttccttagtttgcatgttcttccataaattctttcaagcgttccatcgctgttgtgattgtttccatgctagccgcataagaaagacgtagataaccctcaccatacttaccaaaagccacaccaggaatgaaagcaaccgcttttttacgcgcaaaatcttgacagaacttaaacgaatcttgttcataaccagcaggaatcttcgcaaaaatgtaaaaagcaccgtctggtttaataatcttaaagccaagagcagacatcttatcaataatataatcacgacgtttgatatattcaactttcatcggcagtgcatcatctttaccagcagaaagagcttcaatcgcagcaaattgagccattgtcgcagcagccgttaccaaatattggtgactcttaatcaactgtgccgtgaaaatagctggcgcaaaaatcaaaccaattcgccaaccagtcatagcatgagattttgaaagcccattaatcaaaatcgtttgctctggaagatattcagcaattgacacatgcggttcatcattataagtcaattcagaatacacttcatctgagatgacaaaaatatcatattttttaagaacatcggccaaagccttaatttgctcacgtgaataagtcacaccagttggattagttggataattaagcaaaactgcttttaatttatcaccttgttccaaaatcgctttttcaagcatttctggtgtcaatacaaaatcatttgccgttgtatcaatttcaacaatttcagcaccaacaagatttgcaattggctcatacccaggataagctggcgctggcaaaagaaccgtatctcctggttccaaaatcgctgtcaaagtcgctgacaaagcttccgttgcaccaatcgtaaccaaaatttcattgtcaggattgtaagacaaattgtattttgacttcacaaaatctgcagcagcttggcgaagcgctggcaaccctgccataccagtataatgtgattgattcgcatcaatagccgctttggcagcttcttttacatggtcaggagttgtaaaatcaggctcacccaaagttaacttcataatccctggcacgtctgaaattgattggtcaaattgacgaatcaatgatacttcgattttatctaagtttttattaaaacggtttgttaaactcatagtctcacctcaaaatctaattacatctattatacataaaattcagataattaaacagcctttttagacttatccacagctctatctttaaaaagattttattaaattatccacatgttaatattttccaaaataatttaaacagaaaaaccgtcagacaaaaatccaacggtttttaacatgaaagctaataaaagtcgtcttatttagcagttcccatttcaaataatggtgacaaaggacgtttttcgtgaatacgagtaattgcttcagcgattaattcagcaattgagatttgttcaattttatcaatcaaacgttcttctgaaagatagatagtatccaaaacaaccaatttttgaatagctgatttttcaatattttcaagtgcaggaccagaaagaacagggtgagtacatgatgcatacaccgctgttgcaccagcttcagcaagagcatccgctgcatgacaaatagtacctgctgtatcaatcatatcatcaatcaagatacattttttacctttaacattaccaatgatgttcataacttcactggtattcattttagtaacactacgacgtttatcaatgatagcaatcggtgtttggaggaattgtgccaatttacgagcacgtgtcacaccaccatggtcaggactaacgacaacaacatcgtctccaaccaatccatgacgatcaaagtaatcagcgatcaatggagcacccatcaaatgatcaactggaatatcaaagaacccttgaatttgagcggcgtgcaagtcaacagtcaaaagacggtcaactcctgcaacttcaagcatattagctactaatttagaagtaatcggttcacgcgaacgagctttacggtcttgacgagcgtaaccatagtaagggataaccacactaattttttcagcactagcacgtttaagcgcatcaaccataatcaagatttccatcaagttatcattaactggtgagctagttgactgcaaaataaagacatggtgtccacgaattgattcttcaatgttgacttggatttcaccatcagaaaattgacgaacagtcgattttccaagttcaatacccatagccgaagcaactttttctgctaattctttgtttgacgacaaggcaaacaattttaaatcagaataagacatgatttcctccaaagtttttatcctataccattttaacgttttttcaagtatttttcaatgacaaatccgttaaatccctataaatacaaggaaatccgagtaaaaagaaaaaagagaaggaaaattccttctcaaatatttattattgatagatgtagtaaacagtaccgccaccccaagttgatgaagttgggtcaaaccatccacggtagttaccaatagatgagttaccagcataattagcttccataacttggatacttgtagaactttgaactgcagttacatatgcaacgtgtccatatccaccaccatcataaggccatacagcaaccgcaccaacttgtggtgtagtacctacagaatgacctgcagcttgtgcgctagcaatccattgatttgcattaccccagttgtttccaacccatgaagcaagtgatttaacaccccaagtacattgaccaacagggtaagtgttcactgagcttgaagatgagctacttgaactgcttgatgaagttgatgttgaagcagttgagcttgtagaagctgatgaacttgaagatgatgagctacttgatgaacttgatgtagttgttgtagcagttggagtaactgtagcagcttgttgagttgaagaagtatcttcagttgctgctgcagtatctgtagatgcagtagttgaatcttgtgatgatgtatctgttgtagtatcaacagtagctgtaccattttcaacagattcttgtgcttgtgctacagatgcagcttgcgcttctgcctcagcttgtgcttgtgcttccgcggcagcttgtgctgcagctgcttcagccgctgcttgttcagcagcttctttttgagctactaagcttgctttttcatcttctgcagttgccaattgagctgacaagttcaattgagctgcttccaattcagcttgttgagttgccaaagctgcttggttttgttcaatagttgctttattagcagctactgtattgatagcttcttggttttcagcttgtttttgttcgatagcagctttatctgcttcttgttgttccaacattttttcgtttgcagaaacaacctcacgaacagcagctacacgattaatagcatctgaaattgatttagaattcaagatagtattaatgtagcttgtagctgtgttagttttttgagcactgcgtgcttgttttttcaaagattcattacgagcaacaatcttgcttgaaagagcttgaatttcttcgctcaatttttgagattctgcttcgagttgagcattttgtgcttccaattcatcttgttgtgattgaagtgaagtcacttgttcttgaagagcatcaacttgactttgtgcagctgcttgctcagatgtaagattactgataaccgcatcttgtgcagcgatttgtgtatcataatcatccgcatttactgtagcggctgccgttccaagtgttacaccactgacaagaacagctgataaaattctttttttcatataaattaaactactcctttttgataagacattattattttaccaaaaaatcacgcaattaatattacgtgattgttacatttgtgttttgttctggtaatctaactttccaaaaatacttttttaaacactttttggaagattaagtacataagaatattgtagataagagttggtgcaaagcaataagctataaaataggtcattgacatcgttgtcattccaagtagaatagctcctaattccccaacaatttcaaacaaaaacaaaacaataatataaaagattaatgtttgaaaattgctcacaaagaaatttttactaattttactagtaaaaatggctagaatcggtaacaaaaagataactaaaccaattcggtttaaatagtaaatatcaaatatcccacccaaaacaagcgagctgataaacataaaatatttattcttatcgtgataaaagtacaaaacagctaatagcaataaatgactagaaaccttcaaatgataagaaaatatcgaactcgctaaaaaagatagttgtccatcaattaacattaataggaaaagtaacaatagtaaaaaatacttatttttataaaatttcactttaatcaccaacaattgttacataagaaatatcagagaagtctgctgtcggagtcacatagacaacacgctccaaactttctgaactattttttacactagaaaccgtaccgacagaaatattggcaacagtatctccatctagaccactcgttacaacactatctccttcttcaatatccacagaagaattcaaatttgtaattacaaaacattttttatccgaatcataagattccaataaaccataaacttctgctgaagaggtcgtaatcttaattggaatattaaaatctgaaccatttgataaaagtgttatactcgaagtcgtagaatccacatcagataccgtaccgattagaccaccacccgataaagccaacatttttttcgttatattattcttctttcctagcttaacagttaacgaatcataccaagaaacgggacttcggacaataacctttccagtagctgaaaattgagaagtaattgatgatgaagctccaatctcactattaagctcttcattttcttcctttaaagaatcaattaattcactttgatcctctaattctgcaactttttgctttaattccttgttctcagaatacgtattaaaaagatctcgaatttcctcattagcagaatctaagaagcgaaaaggagcagaaaccacggaatccacacgagcaacaacactccttataggggaagagattgcagaaaccaccccagaatttctaaataaaaaagctaaagacatgcccaaaagcaataaaatcaataccgcgaaaaaaacaaaacgagagattcttaattttttcaagattttgcaccaactatcctagaatataaaaaataaaacgagatatccaaagataatctcgcttcaaaatagcacggagaataagggattcgaacccttgcgccagttacccgacctaacgatttagcaaaccgtcctcttcagcctcttgagtaattctccattccatgtatgggcacaagtggactcgaaccaccgacctcacgcttatcaggcgtgcgctctaaccagctgagctatgcgcccatgaaagttggaataaccaaaatataaataaaagcgggtgacgagaatcgaactcgcgacaacagcttggaaggctgtagttttaccactaaactacacccgcataataaaatataaaattaatggcgcgagacggaatcgaaccgccgacacatggagcttcaatccattgctctaccaactgagctaccgagccttctattgcgggagcaggatttgaacctacgaccttcgggttatgagcccgacgagctacctagctgctccatcccgcgtcaacaatattaaaggaggatgtgggattcgaacccacgcacgcttttacacgcctgacggttttcaagaccgttcccttcagccggacttgggtaatcctccaaattataatatattaaaatatatggaccttgtaggactcgaacctacgaccgctcggttatgagccgagtgctctaaccagttgagctaaaggtccaaagtcatccataatatcttatagcggcgaaggggatcgaacccccgacctcccgggtatgaaccggacgctctagccagctgagctacaccgccatcaatcgggaagacaggattcgaacctgcgaccccttggtcccaaaccaagtgctctaccaagctgagctacttcccgaaatatgcaccctgcaggattcgaacctgcaaccgcctgattcgtagtcaggtactctatccagttgagccaagggtgcatcttattaaattttctgccgaggaccggaatcgaaccggtacgaaggttacccttcgcaggattttaagtcctgtgcgtctgccagttccgccaccccggcctctacaagcgaacgacgggattcgaacccgcgacccccaccttggcaaggtgatgttctaccactgaactacgttcgcataaagagtatcctatgccggctacatgacttgaacacgcgaccctctgattacaaatcagatgctctaccaactgagctaagccggctactttcttattaatgcgggttaagggacttgaacccccacgccgttaagcgccagatcctaaatctggtgcgtctgccaattccgccaaacccgcatattaatatgacccgtactgggctcgaaccagtgaccctctgattaaaagtcagatgctctaccaactgagctaacgagtctaacggtcccgacgggaatcgaacccgcgatcttcgccgtgacagggcgacgtgataaccgctacaccacgggacctttggtatatttaccttcttaatgggagttaacgggatcgaaccgctgaccctctgcttgtaaggcagatgctctcccagctgagctaaactcccttttgctaagcgactaccatatctaacagggggcaacccccaactacttcaggcgttctagggcttaactgctgtgttcggcatgggaacaggtgtatctcctaggctatcatcacttaactctgattgattatccaatcaaaattgaatacctatatattctaacaagtttccgacgcgctgtcaattctctcagttactttggataagtcctcgagctattagtattagtccgctacatgtgtcaccacacttccactcctaacctatctacctgatcatctctcagggctcttactgatattaaatcatgggaaatctcatcttgaggtgggcttcacacttagatgctttcagcgtttatcccttccctacatagctacccagcgatgcctttggcaagacaactggtacaccagcggtaagtccactctggtcctctcgtactaggagcagatcctctcaaatttcctacgcccgcgacggatagggaccgaactgtctcacgacgttctgaacccagctcgcgtgccgctttaatgggcgaacagcccaacccttgggaccgactacagccccaggatgcgacgagccgacatcgaggtgccaaacctccccgtcgatgtgaactcttgggggagataagcctgttatccccagggtagcttttatccgttgagcgatggcccttccatgcggaaccaccggatcactaagcccgactttcgtccctgctcgagttgtagctctcgcagtcaagctcccttatacctttacactctgcgaatgatttccaaccattctgagggaacctttgggcgcctccgttaccttttaggaggcgaccgccccagtcaaactgcccgtcagacactgtctccgatagggattacctatctaggttagagtagccataacacaagggtagtatcccaacaacgcctccaccgaaactagcgtcccgatttcgtaggctcctacctatcctgtacatgtggtacagatactcaatatcaaactgcagtaaagctccatggggtctttccgtcctgtcgcgggtaacctgcatcttcacaggtactaaaatttcaccgagtctctcgttgagacagtgcccaaatcattacgcctttcgtgcgggtcggaacttacccgacaaggaatttcgctaccttaggaccgttatagttacggccgccgtttactggggcttcaattcacaccttcgctaacgctaagcgctcctcttaaccttccagcaccgggcaggcgtcaccccctatacatcatcttacgatttagcagagagctgtgtttttgataaacagttgcttgggcctattcactgcggctgactctaagccagcgccccttctcccgaagttacggggccattttgccgagttccttaacgagagttctctcgctcacctgaggctactcgcctcgactacctgtgtcggtttgcggtacgggtagagtataattaacgctagaagcttttcttggcagtgtgacatcactaacttcgctacttaacttcgctccccatcacagctcaatgttatagatataagcatttgactcatatcacacctcactgcttagacgtgctcttccaatcgcacgctttagttagcctactgcgtccctccttcactatatactctagtacaggaatatcaacctgttggccatcggatacacctttcggtctctccttaggtcccgactaacccagggcggacgagccttcccctggaaaccttagtcttacggtggacaggattctcacctgtctttcgctactcataccggcattctcacttctatgcgttccagcgctcctcacggtacaccttcttcacacatagaacgctctcctaccatacctaaaaggtatccacagcttcggtaatatgttttagccccggtacattttcggcgcagggtcactcgactagtgagctattacgcactctttgaatgaatagctgcttctaagctaacatcctagttgtctgtgcaaccccacatccttttccacttaacatatattttgggaccttagctggtggtctgggctgtttccctttcgactacggatcttagcactcgcagtctgactgccgattatatctcattggcattcggagtttatctgatattggtaatccggaatggacccctcaatcaaacagtgctctacctccaagagacttaacatcgacgctagccctaaagctatttcggagagaaccagctatctccaagttcgtttggaatttctccgctacccacaagtcatccaagcacttttcaacgtgccctggttcgggcctccagtgagttttacctcaccttcaccctgctcatgggtaggtcacatggtttcgggtctacgacatgatactaagccgccctattaagactcggtttccctacggctccgtctcttcaacttaacctcgcatcatatcgtaactcgccggttcattctacaaaaggcacgctctcacccattaacgggctcgaacttgttgtaggcacacggtttcaggttctatttcactcccctcccggggtgcttttcacctttccctcacggtactggttcactatcggtcactagagagtatttagggttgggagatggtcctcccagattccgacgagatttctcgtgtctcgccgtactcaggatactgctagggtttaagactatttcgattacgaggctgttactctctttggcttaccttcccaggtaattcttctataatcttgcgtcccacaacgcagtcctacaaccccgatgtgtaaacacatcggtttgccctcttgccagttcgctcgccgctactaaggcaatcgcgtttgctttctcttcctgcagctacttagatgtttcagttcactgcgtcttcctcttcattaccttaacagtaatgagtgacatgcatcacatgccgggttcccccattcggacatctctggatcaatgtttacttacaactccccaaagcatttcgtcgttagtcacgtccttcatcggcttctagtgccaaggcatccaccgtgcgcccttattaacttaaccttattttggtcttctgaccttaaactcattaaatcacagcgtttcggtttatttcttgttactttctacaattatttctaattgcggaatttgatatagatattcaattttcaatggacaatcaccttgaatctttcgattcaatggagcctagcgggatcgaaccgctgacctcctgcgtgcaaagcaggcgctctcccagctgagctaaggccccacaagacctctcaaaactaaacaagacttcccaaacgtgcttccgttttttccttagaaaggaggtgatccagccgcaccttccgatacggctaccttgttacgacttcaccccaatcatctatcccaccttaggcggctggctcctaaaaggttacctcaccgacttcgggtgttacaaactctcgtggtgtgacgggcggtgtgtacaaggcccgggaacgtattcaccgcggcgtgctgatccgcgattactagcgattccgacttcatgtaggcgagttgcagcctacaatccgaactgagattggctttaagagatttgcttgccgtcaccgacttgcgactcgttgtaccaaccattgtagcacgtgtgtagcccaggtcataaggggcatgatgatttgacgtcatccccaccttcctccggtttattaccggcagtctcgctagagtgcccaactcaatgatggcaactaacaataggggttgcgctcgttgcgggacttaacccaacatctcacgacacgagctgacgacaaccatgcaccacctgtcaccgatgttccgaagaaactttctatctctagaaatagcatcgggatgtcaagacctggtaaggttcttcgcgttgcttcgaattaaaccacatgctccaccgcttgtgcgggcccccgtcaattcctttgagtttcaaccttgcggtcgtactccccaggcggagtgcttaatgcgttagctgcggcactaagccccggaaagggcctaacacctagcactcatcgtttacggcgtggactaccagggtatctaatcctgtttgctccccacgctttcgagcctcagcgtcagttacagaccagagagccgctttcgccaccggtgttcctccatatatctacgcatttcaccgctacacatggaattccactctccccttctgcactcaagtttaacagtttccaaagcgaacaatggttaagccactgcctttaacttcagacttattaaaccgcctgcgctcgctttacgcccaataaatccggacaacgctcgggacctacgtattaccgcggctgctggcacgtagttagccgtccctttctggtaagttaccgtcactgtgtgaactttccactctcacacacgttcttctcttacaacagagctttacgatccgaaaaccttcttcactcacgcggcgttgctcggtcagggttgcccccattgccgaagattccctactgctgcctcccgtaggagtctgggccgtgtctcagtcccagtgtggccgatcaccctctcaggtcggctatgtatcgtcgccttggtaggccgttaccccaccaactagctaatacaacgcaggtccatctactagtgatgcatttgcatctttcaagcatctaacatgtgttaaacactgttatgcggtattagctatcgtttccaatagttatcccccgctagtaggcaggttacctacgcgttactcacccgttcgcaactccttctactctagcaagctaaagtagtcagcgttctacttgcatgtattaggcacgccgccagcgttcgtcctgagccaggatcaaactctcatttaatcttgttctcattctgtcactgacagatttattttcttaacaggtcgatttctcaacccgcacgtttggttcgtcttgttcagttttcaaaggtctttgcggatttataaaatccacatcgggaagacaggattcgaacctgcgaccccttggtcccaaaccaagtgctctaccaagctgagctacttcccgaaatatgcaccctgcaggattcgaacctgcaaccgcctgattcgtagtcaggtactctatccagttgagccaagggtgcatcttattaaattttctgccgaggaccggaatcgaaccggtacgaaggttacccttcgcaggattttaagtcctgtgcgtctgccagttccgccaccccggcctctacaagcgaacgacgggattcgaacccgcgacccccaccttggcaaggtgatgttctaccactgaactacgttcgcataaagagtatcctatgccggctacatgacttgaacacgcgaccctctgattacaaatcagatgctctaccaactgagctaagccggctactttcttattaatgcgggttaagggacttgaacccccacgccgttaagcgccagatcctaaatctggtgcgtctgccaattccgccaaacccgcatattaatatgacccgtactgggctcgaaccagtgaccctctgattaaaagtcagatgctctaccaactgagctaacgagtctaacggtcccgacgggaatcgaacccgcgatcttcgccgtgacagggcgacgtgataaccgctacaccacgggacctttggtatatttaccttcttaatgggagttaacgggatcgaaccgctgaccctctgcttgtaaggcagatgctctcccagctgagctaaactcccttttgctaagcgactaccatatctaacagggggcaacccccaactacttcaggcgttctagggcttaactgctgtgttcggcatgggaacaggtgtatctcctaggctatcatcacttaactctgattgattatccaatcaaaattgaatacctatatattctaacaagtttccgacgcgctgtcaattctctcagttactttggataagtcctcgagctattagtattagtccgctacatgtgtcaccacacttccactcctaacctatctacctgatcatctctcagggctcttactgatattaaatcatgggaaatctcatcttgaggtgggcttcacacttagatgctttcagcgtttatcccttccctacatagctacccagcgatgcctttggcaagacaactggtacaccagcggtaagtccactctggtcctctcgtactaggagcagatcctctcaaatttcctacgcccgcgacggatagggaccgaactgtctcacgacgttctgaacccagctcgcgtgccgctttaatgggcgaacagcccaacccttgggaccgactacagccccaggatgcgacgagccgacatcgaggtgccaaacctccccgtcgatgtgaactcttgggggagataagcctgttatccccagggtagcttttatccgttgagcgatggcccttccatgcggaaccaccggatcactaagcccgactttcgtccctgctcgagttgtagctctcgcagtcaagctcccttatacctttacactctgcgaatgatttccaaccattctgagggaacctttgggcgcctccgttaccttttaggaggcgaccgccccagtcaaactgcccgtcagacactgtctccgatagggattacctatctaggttagagtagccataacacaagggtagtatcccaacaacgcctccaccgaaactagcgtcccgatttcgtaggctcctacctatcctgtacatgtggtacagatactcaatatcaaactgcagtaaagctccatggggtctttccgtcctgtcgcgggtaacctgcatcttcacaggtactaaaatttcaccgagtctctcgttgagacagtgcccaaatcattacgcctttcgtgcgggtcggaacttacccgacaaggaatttcgctaccttaggaccgttatagttacggccgccgtttactggggcttcaattcacaccttcgctaacgctaagcgctcctcttaaccttccagcaccgggcaggcgtcaccccctatacatcatcttacgatttagcagagagctgtgtttttgataaacagttgcttgggcctattcactgcggctgactctaagccagcgccccttctcccgaagttacggggccattttgccgagttccttaacgagagttctctcgctcacctgaggctactcgcctcgactacctgtgtcggtttgcggtacgggtagagtataattaacgctagaagcttttcttggcagtgtgacatcactaacttcgctacttaacttcgctccccatcacagctcaatgttatagatataagcatttgactcatatcacacctcactgcttagacgtgctcttccaatcgcacgctttagttagcctactgcgtccctccttcactatatactctagtacaggaatatcaacctgttggccatcggatacacctttcggtctctccttaggtcccgactaacccagggcggacgagccttcccctggaaaccttagtcttacggtggacaggattctcacctgtctttcgctactcataccggcattctcacttctatgcgttccagcgctcctcacggtacaccttcttcacacatagaacgctctcctaccatacctaaaaggtatccacagcttcggtaatatgttttagccccggtacattttcggcgcagggtcactcgactagtgagctattacgcactctttgaatgaatagctgcttctaagctaacatcctagttgtctgtgcaaccccacatccttttccacttaacatatattttgggaccttagctggtggtctgggctgtttccctttcgactacggatcttagcactcgcagtctgactgccgattatatctcattggcattcggagtttatctgatattggtaatccggaatggacccctcaatcaaacagtgctctacctccaagagacttaacatcgacgctagccctaaagctatttcggagagaaccagctatctccaagttcgtttggaatttctccgctacccacaagtcatccaagcacttttcaacgtgccctggttcgggcctccagtgagttttacctcaccttcaccctgctcatgggtaggtcacatggtttcgggtctacgacatgatactaagccgccctattaagactcggtttccctacggctccgtctcttcaacttaacctcgcatcatatcgtaactcgccggttcattctacaaaaggcacgctctcacccattaacgggctcgaacttgttgtaggcacacggtttcaggttctatttcactcccctcccggggtgcttttcacctttccctcacggtactggttcactatcggtcactagagagtatttagggttgggagatggtcctcccagattccgacgagatttctcgtgtctcgccgtactcaggatactgctagggtttaagactatttcgattacgaggctgttactctctttggcttaccttcccaggtaattcttctataatcttgcgtcccacaacgcagtcctacaaccccgatgtgtaaacacatcggtttgccctcttgccagttcgctcgccgctactaaggcaatcgcgtttgctttctcttcctgcagctacttagatgtttcagttcactgcgtcttcctcttcattaccttaacagtaatgagtgacatgcatcacatgccgggttcccccattcggacatctctggatcaatgtttacttacaactccccaaagcatttcgtcgttagtcacgtccttcatcggcttctagtgccaaggcatccaccgtgcgcccttattaacttaaccttattttggtcttctgaccttaaactcattaaatcacagcgtttcggtttatttcttgttactttctacaattatttctaattgcggaatttgatatagatattcaattttcaatggacaatcaccttgaatctttcgattcaatggagcctagcgggatcgaaccgctgacctcctgcgtgcaaagcaggcgctctcccagctgagctaaggccccacaagacctctcaaaactaaacaagacttcccaaacgtgcttccgttttttccttagaaaggaggtgatccagccgcaccttccgatacggctaccttgttacgacttcaccccaatcatctatcccaccttaggcggctggctcctaaaaggttacctcaccgacttcgggtgttacaaactctcgtggtgtgacgggcggtgtgtacaaggcccgggaacgtattcaccgcggcgtgctgatccgcgattactagcgattccgacttcatgtaggcgagttgcagcctacaatccgaactgagattggctttaagagatttgcttgccgtcaccgacttgcgactcgttgtaccaaccattgtagcacgtgtgtagcccaggtcataaggggcatgatgatttgacgtcatccccaccttcctccggtttattaccggcagtctcgctagagtgcccaactcaatgatggcaactaacaataggggttgcgctcgttgcgggacttaacccaacatctcacgacacgagctgacgacaaccatgcaccacctgtcaccgatgttccgaagaaactttctatctctagaaatagcatcgggatgtcaagacctggtaaggttcttcgcgttgcttcgaattaaaccacatgctccaccgcttgtgcgggcccccgtcaattcctttgagtttcaaccttgcggtcgtactccccaggcggagtgcttaatgcgttagctgcggcactaagccccggaaagggcctaacacctagcactcatcgtttacggcgtggactaccagggtatctaatcctgtttgctccccacgctttcgagcctcagcgtcagttacagaccagagagccgctttcgccaccggtgttcctccatatatctacgcatttcaccgctacacatggaattccactctccccttctgcactcaagtttaacagtttccaaagcgaacaatggttaagccactgcctttaacttcagacttattaaaccgcctgcgctcgctttacgcccaataaatccggacaacgctcgggacctacgtattaccgcggctgctggcacgtagttagccgtccctttctggtaagttaccgtcactgtgtgaactttccactctcacacacgttcttctcttacaacagagctttacgatccgaaaaccttcttcactcacgcggcgttgctcggtcagggttgcccccattgccgaagattccctactgctgcctcccgtaggagtctgggccgtgtctcagtcccagtgtggccgatcaccctctcaggtcggctatgtatcgtcgccttggtaggccgttaccccaccaactagctaatacaacgcaggtccatctactagtgatgcatttgcatctttcaagcatctaacatgtgttaaacactgttatgcggtattagctatcgtttccaatagttatcccccgctagtaggcaggttacctacgcgttactcacccgttcgcaactccttctactctagcaagctaaagtagtcagcgttctacttgcatgtattaggcacgccgccagcgttcgtcctgagccaggatcaaactctcatttaatcttgttctcattctgtcactgacagatttattttcttaacaggtcgatttctcaacccgcacgtttggttcgtcttgttcagttttcaaaggtctttgcctcttgcgagacaacttctatattctatcaaatctgaaacagcttgtcaaccactttttcaagtttttttcaactccgtttcaaaccgattgccgccgcagccctctcggacaacagctatattagtgtatcatctcaagcttactttgtcaagaacttttttagcttttctgtaaacctaagacctgccctcttgcgacagctcatctagtatactaaacttaggaaaaactgtcaaccgattctctgaacttttttaagtgtgccttgttcccttttaggtggggtggtaagattatgactaaggagcttgtagaaggagggagagaggcggagaaagaccacttgaggctctttcaagttttatgtctcactacaacgaaagagagcctatataggctctctttttggtaattattgatgttaagaatttgtactattctttagaatcatcagagtcatccattttttctttgacttcatcatatgatagagcgtgtgcttcttcggtatcgttttctagttcttcaggcatttttcctgtttcatagattgatttaatttgagcagcatcaagcgtttcatatttaagaagtgcttctgcaatgagtttatgtgtttcacgattattattgataatatccgctgctttatcacgtgcttcgttaagaagtgtgcgaacttcgtcatcaatcatttgtgcagtttgtgcagaatatgtcttttcaggtgacaattgtcctgtcattactgcgtgatttccttcatattgaacaggaccaagtttatcactcataccatactcagttaccatagcacgagctaattgtgtggcttgttcaaagtcatttgaagcgcctgttgtttgagcattaaagataatttcttcagcaacacgaccacccatcaaaccagctaattgttctttcaaatcatcttttgaatgtaacatttgatcttctttaggaagggcaatcatatagccaccagcacggccacgtggcacaatagtaactttatggacaacacgtgcacttgaaagtactaaaccaacgattgtatgccctgcttcgtgataagcaaccatttctcgttctttttgagagattgtacggtctttcttagaaggtcctgcaataactctatcttctgcttcgtcaatatctgaagcatcgatttttttcttgttacgacgagcggcaactagtgctgcttcgttaagaacattttccaagtcggcacctacaaatcctggcgtttgttgggcaacaacttttagattaacatcttctgctaatggtttatttttagcatgaactcggagaatagcttcacgtcctttaacgtctgggctacctacaagaattttacggtcaaagcgtcctggacgaagaagggctgggtctaagacgtcgctacggtttgttgctgcaataacaatgatactttcattgccttcaaagccgtccatttcaataaggagttggttgagtgtttgttcacgttcatcatttccaccacccataccagcgccacgacggcgtccaacggcgtcaatttcatcaatgaaaataatggcacgctcagcctttttagcatcttcaaaaagcgatcttacacggcttgcaccgacaccaacaaacatttcaacgaaatcagaacctgagattgagaagaatggaacaccagcttcaccagcgacagctttagcaaggagtgtcttacctgttcccggagggccttctaaaaggacaccagcaggaatacgagcaccaagggctttgtattttttcggatttttcaagaaatcaacaacttcaacaagttcttgtttttcttcttcagcaccagcgacatcagagaaacgaacttttacattacccttactttgagatttggcacgatttttaccaaaactcatcgctccacgagcaccatttcctccttgattcatcatcacaaagaaaaagacaatcaagacaatgaaaggaatgtaagtaataatgtaagaaatccaagttccgcttgaactttcttgtttgacagtaacttcaacgtcggcatcttctgctgcatttgtaatagcttcaatagaagagtcacttggtaaaacaattgaagtgaattctgttacagtagaattggtacttccctccaagaacggaaggcttgaacttgtttcagtcgtttgagcttttgtatattcaccactgacttcaataatacttccacttggttggtaagtgattgatttaatatcacccgctttaatttgtttaattaaagttgagtaattaatttgttgactttgtgtacttgtccctcttagataatattgaaaggctgtaatccctgcaataatcaaaagaatgtaaataaaggaattccgaacaaagccattatttttgttatttttcatatagtaattatcgaccttctattattttgaatagatttcttcctttagtacaccaacatatggtaaattacggtaacgttcagcataatcaagaccaaaccctacaataaattcgtttggaacatcgtagcaaacataatctgcttcgatatcgacaacgcgaccttctggtttatcaaaaagagttgcaatttttactgaatttgctttacggtatttaaacatgtcacgaaggtatttaagagtacgtccagtatcaatgatatcttcgataaagacaacatcacgaccttcaatattagtgtcaacgtcttttaaaatcttcacttcaccgctactagttgtttgattaccataactagaaacgaccataaagtctaattcaacatgtgtatcgatatgtttgattaattctgccatgaatggtacagaacctttcaaaacaccgattaaaagaggatttttaccttcataatctttcgttagttgttcgcctaattctttggttttggcaataatctcctcttctgagtacaaaacttttttaatatcttgttcaagcatgacatcacctatttctaattttttcaatatacaatttgccctccattatatcatgtttagagggttttctcaaataagttttaccgccaaccaagacaaaaataatttttttatcttgttcaccgataatagcatctgttcgttcttgaattgggattttttcgtcaataaaaagcctacgcaatttttttgaaaaagttccaaaatcaatggaatcacccgcttgtctttgtcttaaaagaattgggtgagaactgtaaacaggaatgccatccctatccttgtttttaaattgaaatcgatactgaccatatttgactatactgtcatattctagcactttttctgctgattccctatcggtcttaggtctgatttttgtgatttgaaagctttggtaatctttctttaaccaataatttcccttgatttgatacactagatttgccttatttcgtagcaactgcagcatttcattaaattgaccgtgtgatacttgcaaatcaggaaattcctcaagataattttgaaaaaggacagtttgtacagctgttgtttgtgctaaaaattgcgaacaatctgttacgtcaatttctgctgttaaatcttgaatggcttgaaagagttgtcgactttcttgtccgagatattgcaaagcttgcctaaatttgggattttccttttccaaacttggcagatattgatttctaatgcgatttcgcagataatccaatgactgattagaatcatcttcaaaatgaaaaatttctggtaaatcttttttaggaatagtcaaaaaaggacggattaactctcctgtaccaaacgagctaacagcttgcattcctgataaatgacggagacgactgccacgcaaaaaacgcataaaaatcgtttcagcttggtcatctgcatgatgcgcagtcaccacagcagtgtagtttttttctaccataattttcttaaaaaattgataacgaaaatcacgcgcagctttttccgaaaaaataccagaaaaataatcgacataaatcggaatctgatgtttttcagcccactcacaaaggtaggcttcttccatttctgactcttgtcgctgtttatgattgatatgagcaattccaatctcaatttctaatttatcacggtatatatacaaaaagtgtagcagattcatagaatctactccacccgatacagctattaaaacttttttatgtttggcaaaatatgcctttttttgaatttctttaaaaatattatcgtacatatcactattttaaaatggcgtaaacatcattagcgatatttgaaatatcgtcataagaagcgttgttggtaaaaattgacaagatgaaaggttcatcagcataaataatggcaacgtcatgtttgtaatcataggcatcacctattttatgagctacttgaacgtcaatatctcttgaaatacgtgttgtatcaaaagcagttgatgatagataagaaataatgtcaccatcttgattgtaaatagcttccattaagttagctgctgtcttagatgacatattacgtgctttcatatcaatatctgttcctgctatcgcactaatttctgaattaaagtcatcatcatattgattagcaacataataacctaaaatattagttgccacattatcagaattttgagcgacagcttttaacaaatcatcaatagtatattctttattatcagcggttttgctaattttaccactaccacttgggtcataggctttagcaaaactattgacagcatcaacatattttaaagtatcatttgctgaaattgtaccatcttgaagtttttcctcaacataataaagtgtagccaatttagcaacgcttgctgaatacataacagtatcagcgttaatcccagcggttgtttgcgttgatagctgcttaacgtaaatagaataattactcttattatatttttgattaagaacttgctgaactttttccatacggttatcagtagctgacaaatcatcctcgctaatccaacctttaccatctactttataataagttccgtggtaagttgttgctttttgagtcactgtcacttctgaatacgaagtcagatcagtttttacttctttggttcccgtgacataaggtgcttgataaactttaaaaccatcttctagccaatattcttttgaaatattttcttgactaatcacaacatcatcataaatgaattgacgactagcttcaatataactgccatccgataattcaaaaactggaatggcactgtcattaatggttaaatcaacaattgataacgtatcaccagctgataaagtatcagatactgtcgttaaagcagtgtctttgtaggtgttgctgtcttgagccaaaataggattggtcggaatactatcaaaataagttgtttccgctactacatttgatgtcagttgatacttttcttcatttgttaaggcaatcgttttttcggtgctaacgacagaaagagaagtcaagaaaaatggtatcagcattactgcaaatagttttttcattggcttctcctttcgttagtttttagttgattgatgattttcttctctgagtttttgattttctttggctaattcttccaatttttcatcggaataagccagaaatttttcaatggtttcgattaaattttccatattattttggtaataagtttggcaacggatagattgtttcaccagaacgtgataagtaatatttagcgcgagcatatttttcaacataagtatcatcttttagacggtcagctagtagcttttctgcgtctgtttcaacgactaatttatcataacttttttgcagtgaaacaacttgctctttacgctcttgtaaagtttggtaacttttaacaaggttataagttggtaaaataaacagtaacatgacaacaatcaaaatccaacccataaaacgattacgtttgcggttttcttcttcgacataacgttttttggtgttttcgtcattgatatattgattgttcaattgaacgatattaggcttctccatccgcttctatccttgtttcgttaatgatttcatacattctggttgcatcttcttttttcgtgctatctttcatttctagaacacgtactgttagcaatttatttccaaaacgaatttcaatttcgtcgttaatttttaaatcagttgatgatttggctaagataccattgactttgatgcgtcctttatctgcaacttctttagctactggacgacgttttataatacgggatacttttaaatatttatcgagtctcataatatgtcacctcgcaatcttttctattttatcatttttttaggaaaatggctgacttaaacgcgtttgttaagataatgtaataaaagagagctaataccctcctatgtaaattatgaaatggcttaaaataatttaataatgaaaaatcagagcagaaataactgtaccagaaaaaaagataataaatgcaataactatcacactaaccacaaaccacaattcacttaaaatacttgtttttacattctttttaggatttaaaaaatttaaaatatcagcataggtctgaagttctcgattttttaagatatataatatttgaaaagctgaataggcaactggcatagccaatagccacagaatcgcagtcgcctgtcctgaatccaataaataacgtgtgggtaccgctaccgagaaaagaaaccaagaaattcctccaataatgagccatttcttaaactgcgactggtcaacttgatgtttcataatatcaacatctcctttgattagattatctaaggaaatgccaaaataggtcgctatcaacaaaagtgaattaatatctgggtaagttttacctcgttcccaattagaaattgtttgacgtgaaacatagagcttttctgccaattcttcttgggagagatttttttcctttctcaattcaactaatctacgttcaagttccattttgacctccttgataattccagtctagactttatcaaaaagtttaccataaaatctctttgatatactagctttctactgacaaaaggctttgacaactagtctttttcaatttttctggatttgatttcagctagcattttaccgaaattctgaagttcttctaaaatctcataatcttttttatcacggatattaaaagtaatttcaattttaccttgattttcgccaatacgggctttcaagtttgtttttgaaagagcttcaaaataatcttgtgtcaagtaatgttgcagcgaagctttttcaaaacgtactaatagattgttatctttacgttccacaaattctgtgaaagcattgtccatataagctttaaccaagccaatttcaagtaagtaggcgacttggtcagggtactcgccaaaacggtcaattaactcatcttgtaaactttgataatctttctggctttcaatttcacgaatacgtttataaatttcaattttttgacgttcatcgtcaatatattcgcttggtaaataagcatcgatttgtaaattcatctccgcattgctcttacggcgcgcttgagatttgccttgtttcttagcgatagcctcttctaataactgcgaatacatttcaaaaccaacagagtcaataaaaccactttgtgaggcgccaagaatatttcctgcaccacgaatggataaatcacgcatggcaattttgaaaccagaacctaattctgtaaagcctttaatggcatctaaacgtttttcagagacctctgtcaaaatcttgtctgggcggtacatgaggtaggcgtaagcaattcgattagaacgcccaacacgtccacgaagttgatacaaagttgacaagcccatgtggtctgcattttcgataaataaagtattaacattagaaatatcaacgcctgtttcaatgatagttgtcgcaaccagaacatcgtaaacaccatcaataaagtccatgagcgtattttcaagttgaatttcactcatctgaccatgaacaaaaccaatgcttgcttcaggaaccaactcttgcaattctgacactttttggtcaatagtgtcaaccctattgtaaacgtagaaaacttgtccgccacggtcaatttcacgaatgatagcctcacgaatcagaccaggattagtttccaaaacgtaagtttgaacagggtaacggttagtcggtggcgtttcaataactgacaggtcgcgaattcccaacattgacatatgaagggttcgtggaattggagtcgctgtcaaggtcaacacatcaactttagtcttaagctcttttaatttttctttgtgcttaacgccaaaacgttgctcctcatcaataataatcaaacctaaatcagcaaaatcaacatctttagatagcagacgatgagtaccaataatgatatcaacttgaccttttttcaacttgtctagagtgtcattttgttcttttttgctacgaaaacgactaagcacatcaactgtaacaggataattttcaaaacgctctgagaaatttgtgtagtgttgttgagcaagaacagttgttggcactaagacagctacttgtttatggtctttaacagctttaaaagcggcgcgcatcgcaacttctgttttaccaaagccaacatccccaaccaataagcgatccattggcttatcttcttccatgtcgtgcttaatttccttgatagagcgaagctggtcctctgtttctacaaaagcaaaatcttcgtcaaattcccgctgcaagtcatcgtctggtgaaaaagcaaaaccttttagctgactacgttccgcatacaatttcaacaaatcatccgcaatgtcttcaacttgcttagaaaccttttgtttggtcttttggaaacgaccgtcatttaatttattgattttaggttccttgccatctgcagaaacgtattttgataaactttcaatttgctctactggcaatgaaattgttgaagaaccttgatattgaatggtcaaataatcgcggtgcacaccatggatttcaattgtttcaattcctaaaaatttaccaataccatgaacatggtgaaccacataatcaccttttgacaattcattgtagtctttcaaacgttcggcattgctaatatttgaacgacgaatacggcgcttaattttcttatgataaatttcatgctcggtaatgagaacaattttctcatcagcaaaataaaagccatttgataaattgccaacgactagctgagcttgttgtgcttgtaaatcatctgcagcaaccacaggtaattccaaaccatattcatgtaaattctcctgtaaacgttctaagccatgctgcgaatctgcttgaattaaaacggtcgctttagatttttgataacgattaacttcatcaatcaataacggaaattgattgaaaaattcttgcattggatattgtgtaaaattatgaagtttatcaaatttaagattacccaatcctttatgaaaattagaaaagaacgttgctggctggtattgacgtaagtctttataaatatcagcaaagtaaaccaagcttgacactgctttaccacgttgtaaatcttctgtcaataagtttgcaacttccaaatcaaacttagcattacggtcaactagcttttgaaaatcatcaaaaaagactggtgttcccttaggaatgtaatcaagtaacgtccattccttcgcataaaagagtgataagaaacgtctaatgtcttgatgcttatactgttcctgagttgcagcataaagctcacttaaataagcttgctgttcatctttagcagtctctaaaaacgtctcaaatgccttactagctctagcaaaatcttcttccgataaaatgagctcatcagctggggaaatggttacctgctcaatattactaagtgatttttgtgtttctgcatcaaactgacgaatgccatcaacttcatcaccaaagaactctaaacgataaggatagtcagctgtcatctcataaatatcaacgatatcaccacgccgactaaattcgcctggattaagaacctgtgatactttttggtaaccgacatttgacagtacctttacaaccttgtcaaggttgtaatcctcaccgacaacaaaatttagctgactttcagcataaatttcgggatttggtagtaaaacacgtgctcccactaaacttgtaattaagataccagattgcttattatcttgtaaaaaatttaaagcttctaggcgtgagtgtgccttatccatcgaggcaaaaataaactctgccgccgcaacatcatccgcaaaaaaagtataaaccttgtcctcaccaatcaagctagataaatcactagccaatttttcaacttcattttgtgttgaggtgatgacaactattttttcctcattagcctgataagcagaagcaatggcaagagctctactagaacctgataagcccataattagttgcctaccaagattagccacgccgctatgccatgtttgaatgagcttattttgactaaataaatcaataatattcatagacttacccattaaatttttgcatggtttttacaaaatctgcttcctgtaaataaaattgaacagcttcattaaccttttcaagtgtattagtaactgtaatataatcatcttggtcaaattttccaagaacatggtcaactaccgaacgaccttgctttggacgtccaataccaactttaatacggtcaaatgcctgcgttccagtgtgagcaatgatagattttatgccattatgcccaccagcagagcctttctgacgtaggcgaatacgccccacttccatatctaaatcatcataaatcactaagaaatcttcaatatcaatattataatacgtcaacaaagcatgaacagcgatgccggaattgttcataaaagtgattggtttgactagataaactttttctccgttgataaaacaagaaccaacttctgctttaaaattcttttcctctgaaaatgtgacattgaaatccttagcaaggcggtcaattgccataaaaccaatattatgccttgtttcgtgatacttactgcctgggtttcccagaccaacaatcatttttaccattaattttcctttccaataaatgccaaaagggctggaaaaacttttttccaacctcggcaatatttaattaattttgcttatacgttaaagcggaattccatgatatcaccatcttgaaccacataatctttcccttcttcacgaagacgacctgcttctttgacagctttttcagaaccatatttgattaagtcatcataagacattgtaatcgcacggataaatccacgttcaaagtcagagtgaatgataccagctgcttgaggagctttgataccacgtttgaatgtccatgcacgaacttctttttcacctgctgtaaagtaagtgccaagaccaagcaagtgataagcagcacgtgtcaatttatcaacaccagattctgttaaaccaaggtcttcaaggaataatgctttatcttcatcatcaagttcagagatttcttcttcggcacgcgctgagatgacaacaacttctgcattttcagttgcagcaaattcgcgaatttgttttacgtattcgatatcgtctggattagctactttatcttcgtcaacgttcgcaacgtaaagtactggttttgttgtcaaaaggaacaattgtttaacaattttttgttcttcttctgtaaagtcaaccgtacgtgctgattttccatcttcaaggactggtttaattttttgaagaacgttaaattctgcgatagaatctttatctttttgagtacgtgccactttttctacacgcgcataacgtttattaacagattccaagtcagcaagaatcaattctaagttaattgtgtcgatatctgcaagtgggtcaacaaaagcatcttcacgcccttgctcacgcataacattttcatcatcaaaagcacgaacaacgtgaacgatagcatctacttcacgaatgttagcaaggaatttattaccaagaccttcaccacgtgaagcaccttttacgatacccgcaatatcagtaaattcaaaggttgttggaactgtttttttcggtgtgataagttcagtcaatttttgcaaacgttcatctggtacttctaccataccaacgttagggtcgattgtcgcgaaaggatagttagcagcttccgcacctgcctttgtaatcgcattaaaaagagttgattttccaacatttggtaaaccaacgatacctgctgttaaagccatattttataagtctccgtttaaattattcaatcatacctattatagcagaaaaactcagcattaaacaagcatttctactatatagcaagcgccattaaccataaaaattgagttcagtatgattattttagtttacgacaaaactttctttaatttgcgttcaaagtcgtggcggctcatcataactatatggtcgcagtttgtgcaacgaattttaatatcagccccaagtcgaatgacttcccattcattggctttttttccagtagcttttatcgtacaagcatggggctttttcatttcaacgtgacttccaagttcgtacattgtttctccttttacaaataaatatagcgtttttgtggtgataaagtaatttcgtttagtgatacaacttcaccatcaatttcaattaaactctcttttggaaagttaaccgtaacctgttttaacgaacagtgatttaagtaagacgatttctcatgtcttttaagaaccaaagacaacagtaccgttaatcgttggaaaaaagtttctcctttggcataaacacactccaaattctcagaatgaacagtcgccgttggccaaatcataatccctccaccaaaataagtattattagctaatgagaaaaagaaatggtcatctaaggtcaagttatctccttccgaactttccaaactcacagaagcttggaggggattttttaataaaaattgaatggcggttgcaacataagtcaattttccaaggtggcatttattaagcacagtttttaacgttgaattagcagcttgattaacaacccatgctgcaaatcctaaatctaagctatttaatactaaaccttcttgataactgtaaaccgtgatttctttaggctgatttgttagcgaggctaataatgtatctaagtttggtactataccaagagcatgcgcaaaatcattaccagaaccgacaggataataggcaaacggaagatttactggcaaatgatagagaacttttgataatgtcccatctcctccgacaatcagaagcttatcttgttctgggtcaaatgtttttagcagtctcgcaacttgatgtaattcatcgtttttatagcgtgttaataaagtgcaaatatctgatgtatgatgtttttcaatatcactgataacttgttttgccccatgatttcctgcatggggattagcaataatataaagcgtcatattattagatattataccataaaaagcgagaacactgcatgaacagtgctctcgctggagattatgaaaaagaaaagttttaggatggttatagtgtataaattcttccttaaatttttcttaaagatttttagtttgtacgaactggagtgattaattgaataaagttctcagcatcatcacctggcatcaaagtaaatggacgcactggtgaaataaagcgaataacaactgtttcactcttcaaggctttaagagcttcaatcagataagttgggttaaagctgattgtcaaatcattgcctgattggtcaatagtatccaattcttcgttaactttaccgacttcaggtgagttaacgtgagcagaaacgctattattagcaatttcaagtttaacagtaccattttgtgttgcatttgaaatcaagtgagcacgttccattgctgaacgaagtgcattggtattaaatgtcacttctgtttcaaaagcatttgtcaacaagcggtcagtatctggataatttccttctaaaagtcgtgtatagaagctaatgtagtcgcttctaaaaagcatttgactatcagagaagaaaacttctaccgtttcaatatcatctgtaaatacagctgcaaattcacgtaaagatttacttggaataacaacgttgaaatcatttgaagtattttccaaagttaatttacgttggctcatacggtgagaatcagttgcgactgctttaaagtctttgtggtcactaagaaccatgtgaacaccagtcaagattggacggctttcttgaagacttgctgcaaaggctgtttcagcaatgatagatttcaatagttttgtttctaaaactaaaggattttcagtagccatttcttgaaggcgagggtaaagatcaacatcttttccttttaaggtaatttctgatttaccacttgttagaacaatttgatggtgttcaatttcttcaaagtctaatgtcacatctggaagacttgaaacgatattaataaagaagtttgcttctaatagtacagcaccagttgaagtaatcaataagcctgcattttcattagaagttggaatagtgttttcaattgaaatttgtccgttagaaccagtcaatgtaatgttactattttgaacttcaattttaatggttgaaagaacaggaatcgcatttttagtagaaatagctctcttggttgcattcaatgcttgaagaaagaaagatttattaattgagaatttaatcataggaaaactcctttagttattaagtattaaattagtagtagtagtaggtcttgtttatattgttgataagtcttaaaatcgcacaaacgtcgcgcgaaaagagttgttaacaacctgtggataagttgctagaaattttaatggttatccacaatacctattttatcttatttttgatggtttcaatttcaatacgcaaactgtcatcttgagctaacatatttttgattttattgtaggcatgtaagaccgttgagtggtcgcgaccgccaaattccttcccgatttttggaagtgagttatcagtcatttcacgcgcgagatacatggctacttggcgcgctaaaacaatatcttgcgtccgtttggttgccttgatttctttaacagtaacgccatagaattttccaacttggctttggatttcatcgattgggataactgtcatttttggaccgtcttgcttacgagcgcgaatcgcttctgccgcgacatcaaccgtaatggtttcaatctttttaatgctagcaacaaggctaatatcttttaaagctccctcaaggtcacgaacgttggaatcaaattgtcctgcaagatactcaatcgtatcttgcggaaaaatataattatattcttgcgttttattcgttaaaatggcaacacgtgtttcaaaatcagggggagtgatattgattgtcaagccccatttgaagcgcgtgaccaaacgttgctcaaggttgtccagatggtcaggtgtacggtcacttgtcagtacaatttgcttgttattatcgtaaagagcattgaaagtattgaaaaattcttcctgtgttccagacaatgttttcttcgctagggattgaatatcatcaattagcaagacatcaagattgcggaatttttcctttaactcttccattgtgtccaaacggatatgaataacaaattcattgatgaaattttcagcagtaatgtactttacacgcgcattgggattattttgcaaaaccgcattaccaatggcattgagcaagtgagtttttcccaacccaggtcctccccaaataaaaagaggattgtaagttgttcctggagcgtctgcaacggcgtaagacgcagaaaatgcccaacggttttcgtcaccttgtacgaaattatcaaaggtatatttggtatttaagtcagaatcgactaggggcaaagtgtttttttgagttgttggaacagtttgtgaagttgtcactactcctgtttgattggctaaatcttcttcaaagacatagttgacaacaatttcagcattataaacctcaaaaccagccgtcaaaataattggtttaagatttttatcccaaaacaactctttcatagggtctaaataaatggtagccgtattttgttcaatttgaatcaaacgagcatccaaaacaaaaaattcatatgttgcttgttttagttggctttttgctaattctagaaccctactccaaaaaatttgttcattttcagtcatagtagtttcctttttgtggataattcaatacctattctaacataaaaaataaaagttttccacaacggtggaaataaaaaatccacattgtttacgaaagttttccacagggtgtggaaaacaaagaaagtgtgataaaactggggattatcaactgttttttctgtggaaaactgtgaaaaataaaaaaagaaatcaacaagctattttagcttgttgataattctgtttaagtcttcttcagattgaaaatgtaaactcacctctccttttgtgccagttttagagacgataattttaacaggaagtcctaactgtttggtcaattcttcttcttgatttcgaatgaaaatatctttctttttgggacgattttttttctttttagcaggttttagtaaatgttcaagttttctaacgctaatatcctctgtcagaattttttgataccacttttcttgttcttcagcatttttaagggttaaaagaacacgcgcgtgtccttgagacagctcacctttttcaacggcatcagagagacttttaggaaggttaagtaatctgaggcaattggtaatgtaggggcgagattttcccataaattgtgctaattcttcatgggtcatttgatttttttccagaagttgctggtaagcttttgcttcttcgattggatttaaatcagaacgttgcaaattttcaacgatagccagctgcatgctctcctgattggagatattttttatgatagcaggaatttcggttaaacctgccatttttgaggctcttagacgtctttcaccggcaataagctcataaccaaagacagttgattctcggacgataatcggctgaataagcccattagttttaatcgaacgtgctagttcttctagctcttcttgtttaaattctaaacggggttggtagggattaggtgagatattttcaattttgattaatgtgagtgtttcaggcataagtcttttatccttaaaaaatgaggctgaggaatgctcagcttcattttcattagttattatttgttatcagtttgaggaagataaatcttgtgttgtcttagttaattcaattgtggctgttttcttatcagttccacggtagaaggttactttgacagagtcaccaacagaatgagtataaaggatactttgaagatctgaagtagatgttacttcttggtcgtcaatagctgtgatgacatcatattgttcgagattaccttcagctggcataccagattgaacagccgccacaacgacaccgcttgttacacttgttggaatgttaagttgagcaattgcatttgttgaaaggtcgctcaagtttaccattgaaataccaagtgctgggcggataacttgcccattttcttccaattggttaataatggatacaacatcgttagatggaatggcaaatcccataccttcgacagattcaccagaacttgatgtagatgaaatcttacttgaattgataccgataacttgtccttcaatgttaattaaagcaccaccagagttacctgggttaatcgctgcatccgtttggatagcatttgttgagatagtttcaccatcatcatttgtcatggttactgtacggctaagacttgagacaataccttgtgttacagagttagcatattcagtaccaagtgggctaccaatagcgatagcagtttcaccgacagtcaatttatcagaatcggcaaattcagcaactgtagatacgttgtcagaagaaattttgacaacggcaatatctgaataagtatctgctccgactagctcaccaacaacttttgttccatcagcaagcatgatttcaatttgttcggccccatcaataacgtgattgttagtgacgacataagcagaatcaccatcttttttgtaaataaccccagaaccttcactgtaaacagtcaaatcatctgtagagcttgaatcgctactactgtctgaatcattgccaaacatttgattgtagaggtcacttgtagaagacgacgagtctgatttgtagttaataacagatacaactgcgtcttgaactttttccacagcttttgttgtatcgttagagttagaatagcttacgctacttgttgttgtttttgtacttgaaccactgacgttagtgattgaaatacctgccatatttaggacgagtattgtacctgcgataccagctataaagccgactaaaatgacacccaatggttttaaccaatttttgtaattaaattttggcaacttgggtaaatttggtaattttatttttttcacgtctctacctcccatttttcttggatagcatataaaaattgacttaattataccttaaaagtaaaaaaaaagaaagtaatccacaacctgtggaaaactttttaaaaatgtgaaaaaatcctgattcaaagctactaaaagccatgttgatgatttatgaacatgtggataaggtgtgaaaagcttgtgaatatgtggtaaaatggagctatgaaagtaaaaattatcgctgttggaaaattaaaagaaaaatatttaaaagacggtattgccgaatatggaaaacgcatgagtcgctttgcaaaatttgaaattgtcgagttagcagacgaaaagacaccagataatgctagcgctgcacaaaatcagcaaattatggaaaaagagggcgaacgcatcctagcaaagatttcagagcgtgattatgttattgtcctagccatcgagggaaaacaactatcttctgaagcttttagtcaagttattgctgatgcgacattaagaggctattctgatattgtttttgtgattggaggaagccttggtttagcagataaggtcaaaaaacgtgctaatctgcgcttgagttttggtttattaaccctacctcatcaattaatgcgtttagttctatcagaacaaatttaccgtgcttttatgattcaacaaggaagcccttatcacaagtaatttagcttgtagtgaaggaataaaaagagtagtaaaggagttaatttaccatgtcttcttactactcttttttagttgctttgtttcatgtgaaacatttgttaaaaataaaaaaagccggctttgagccgacttgagatttgatcccagcaggattcgaacctgcgaccgttcgcttagaaggcgaatgctctatccagctgagctatgagaccatatcaacttaatcattctatcaaaatatcaacttaatcattctatcaaaatatcgactatgctgtcaactaaaaatcaactcataacaataaatcatgattaggaagtaagcgagaaatagtgtgaatttctactaatcattttttataaaaaaatacctataaatcctattttgataactattttttatgatttgactgttttacattttttaccgataatttttgtaaaaaaacgtaaaaaaattgaaaaaaactatagacaaagaaaaaatatctgatataatagtatgagtgttgaggagaaatccttaaagcttctggtccgttggtcaaggggttaagacaccgccttttcacggcggtaacacgggttcgaatcccgtacggactataaactactgcctagcagtttttttctttatccggcatagctcagttggtagtagcgcatgactgttaatcatgatgtcgtaggttcgagtcctactgccggagtgataagacaccttcctaagtttacttaggatttttttatacctaaaaataaagcaggctaaattttagcctgcttttatccttaaatgatactttcttcgtgcaatcatataagcaaggaaaaggatgattcctaatatggataggtaagctccttctttaaaaccatttgggatgtaagttaacgttactttaccttcaccagcttttacatcaactttcataaaaccatcttgcgcttttgaaaccgtaagttttttcccgttttgtgtagctgtccatcctttatcatatggaatggtgaagaataatgaactatcttcgtctgctttataagtagcagtaacggtatttttatcagttgtaacggtaacgtctggattgtcaataatcgccatagctttttgataacttgttaaatctaaagcataaaaattaggttgattgaaggaaacttgactattttcagggaaagtaaatgtgatgtcaagcgtttgtccttcttcaaagtaaccaaggtcaaagaagctgtaagcattatcggttgtgtattctgtcgtttttccattaactgtaatttgaacagattcactattatcattagagaaagtaatgttagggacacttacataaagttgagtattagcagtgacagtgacttgataagtagcacttgttgtcaactgaccatcatttgtagtggtgactcggttattaagcaaattagcaccacctgttagttgagaagctaaacgtgtgaagtatttctcagataatcctgtcaagttattgataaaattagtttggttgtcaagcgtgttgacactaaagtcaatatccttgtaaataccattcgttaaaatagctagttgactagcatattgattttcataaagtgacacattgccagaaccgtcaacataattgaaaccaaatttatcaacactagtttcagaaagattatacttcacagcaaataaactatccatcagcaaggtattattttggtagcgaaggttgagattagtccctgttgatttaaagccaagccggtctaatgtgctactagaggtcgtgtttcggatagacgaaaattgagagataccattgtaattatatttcatactgtcattgccagtttgaggtaacaattcttcggtacgatagaaagtagtattcagttcttgtgtttcgttgacaagtttgtcaatgtctgtcaagttacgattatagctttgtcgagaaggaaagacccactcgctatcaagggctgcaatttgataataagtatttaatgatatttcaaaaattgtaaagataagtgtaaagctgacaaagagtttaaatgatagatacttatttacataactgatgagtataatagcataagcagctaagaaagcaaaggtgataatgacttgcgaaggttctaaaaagtcataatgactttggaacaacgctgtaacaataaatccaagagccaagggaataatcccaataagatattgcttgagtgttaattcttttaaatgagataacgtttcagctgctaataggatgataagaatagagaatgtccaagaatagcggtgaagaaacatatttggcgaatgcataccttgccagataaggtctaatggttcaagataaaaactagcaacaatgagagcaagcattatgccataagctaaacgagtttgccacctgattgatttaatcgtaaagaaaataatagctaatatcaatgggaaaattcccacgtaaatcatcggaatagaaccaaattttgttgtgtcataagagccaacaaaattcttagcaaataaatcaaagaaccatgacgcatctgtaaaccactctgtaaacttagaaaattcctcaccgtgtgtagataggtctaagtaagttggtagcagcatgatgcagctagagagaccagcagagattgacacaactgtaaagtcaataaattttcgtagaatgactttccatttaaattctttagttaattgaacaaggaaataaagaattaaaaagataacaaccatgtatccaaaataatagttttggataaagagaatcgttaaacttaggtaataaaggatgaatttttgctgacctaataagcgattaattcctaaaatgattaaaggcaaaagaatgaatacatcaagccacatattaatttcaatttggctgatagcaaaactcatcaatgcataagaagtcgataagacgatgctgaaaggtttcagcactttagggtagagttgtctgagactataaaaacaacttacccccatacaagcaactttcagtaatgtaaagatataaatagcatcaggcatgctctttagactgaagaaataaacgaaaggtgagaagaagcttccgaggtagtaactaataagagcatagaagtttagtcccaaaccactcgtaaaggtgtaaaaaatactatctgaaccgtgtaaaatatttcgtagattttcagcaaaaatgacatactggtggaaaccgtcactagctaaaatagtcgtgtcactattgaatgaaatatcttcagacaataaggcgaaaaataagataagaaatggcagagcaaatgctgctaagtagtaaagagtattaatgtttggttttaaagattttaatgtcatagctttagtaagacaggttgagatagcttatcccaacctgtttcttttctatatattgtaaagtttgtgtaaacgtcgggaaattattaagagattaatctttccagagttctttaactttggcttgaacttcttcattttcaagaaattcatcataagtttcatcgatacggtcaataactccattttttgaaattacgacaatgtgattagcaagtgtttgaataaactcatggtcatgacttgcaaagataatagattctttgaaatctttcagcccatcattcaagcttgaaattgattccaagtctaagtggtttgttggatcatcaaggacaagaacgtttgatttgaggagcatcaatttagaaagcatcacgcgcactttttctccccctgacaatacgctaactgatttgttaacttcgtcaccagagaaaagcatgcgtccaaggaatccacgaaggaatgtgttatcgtcctcttctttagaagcaaattgacgaagccattcaagaattgattcaccagaggcaaagtcacgtgaattatcttttggaagataagagcggctagttgtgacaccccatttgatagtaccttcgtattcgatgtcatccatcaaagcacgaataagagctgttgtttgaatatcgttttgtccaatgaaagctgttttatcacctggacgtaggatgaagctgatattatcaaggacagtttctccatcaattttaacggataaattttcaacagttaagaggtctttaccaagttcgcgttctgctttgaagttaataaatgggtatttacgactagaaggaacaatttcttctaattcaattttatcaagcattttcttacgagatgtggcttgttttgatttagaagcattggcagagaaacgtgccacgaattcttgcaattctttaattttttcttctgctttagcattgcggtctgcttgtaagcgagcagcaagctcagaagattgtttccagaagtcgtagttaccgacgtaaagtttgattttaccgaaatcaaggtcagccatgtgcgtacatactttattcaagaagtgacggtcatgggaaacgacaataacagtattttcaaagtcaatcaagaaatcttctaaccaagagatggattgaatatcaagaccgttggttggttcgtcaaggagaaggacgtcaggtttaccaaaaagagctttggcaagaaggactttcactttatcaccattggctaattcactcatgttttggtaatgaaggtcttctggaatgtttaagttttgaagtaattgagaagcttcgctttcggcttcccaaccgccaagctctgcaaattcgctttctaactcggcagcgcggacaccatcttcgtctgaaaaatcaggtttcatgtagatagcatctttttctttcatgatgttgtaaaggcgttcatttcccataataacaacatcaatagcacgttcttcttcatagtcaaagtgattttgacgaagaactgataagcgttcatctggaccaagggaaacatgacctgttgttggttcaatatctcctgccaagatttttaaaaatgttgattttcctgcaccgttggcaccgattaaaccataggtatttccagctgtaaagttgatgttaacctcatcaaacagttttctatcgctgaaacgtagtgatacatcagaaactgtaagcaatttttcacctcataatatttatctataagcttcattgtacatgaaaaagccccaattttcaatcagagaaagcggggctttgcattacattggtaaaatgatgtctttttcgtcaagtttatagtattttttgaggctaaatccacgtcccataacttgtgtagcaggcataacgacgataaaggcagtttcgtcaattttttggatatttttttctaaacgagggacttcttgacgagaaacagttgtcattagcatggtatgattttcacctgaataaccaccagtaactggaatttcagtgaccccacggtctgctttcgtagaaatataatgtttgattaaatcattcttaggcgaaacaatcatgatatttcgtgatgaagtgaccccaagttgcatgctattaacgacataaccaatcgtaatcaatgcaataatagaatacataactgtgtcaatgtcaaaggcgacaaatcccatcgcaacactacaaccatcaacgattgtcattgcaacggcaagaggaagtggtgtgtatttatggagaatttgggtgataatacctgttccacctgttgaagaattgccccaaaagacaacccctaaaccaaaaccacaaataatacctccaaaaagcgcagctaacaaaggattgtctgttaaatttggcacaccttcagttagtttaacaaaaatagaataaatccatgacccataaacggtttttacaaatgtctcttttcctaggaaaagccagcaagctataaggagtggaaaatttgaaatcataacaaaattcccagtattccaaccaaataaagctttcaaactaacagctaaaccaacaactccaccagatgcaatgtgattctctaggaaaaaactgttaaaaccgatagcagcaataaaggcccctactgtaacgagcccaaaatcaattaattttttcttcataacaaccctcttctttataacaaacgattctattattgcaaagaagaagatactcgtcaagatttatgtgagagaaagttaatcacggtgcataattctcattttttaattttattaaaaagaaattcccgaagaaactgtataattattctttctaagaaagagagaatttcctaggaaaaaagctattagcttgacaaagtttctagaatttcataaaatgaagaagattcagaagagtaatgtaaacgcgtacttttagagagctgatggtgctgaaaatcagtagtacccttgcatgaatgggctgatgtatataatggaaaataatgtttgcatttatctgtgaacttttaatagtggtaagagatggtagaaaattttctatcaattgaggtggtaccgcgtattaataacgccctcacgtagtttagctacgtggggttgttttaatttgaaattaattttgaggtgatagaatggtaaaaccaattattttgacaggtgaccgtccaactggtaagttgcatttaggacactatgtcggcagtttaaaaaatcgtgtgttattgcaaaatgaaaacaaatacgatatgtttgttttcttggcagaccaacaagctttgacagaccacgctaaggaatctgaaattatcagagaatcagttggaaatgtagcattggactacttatcagtagggcttgatccagctaaatctacgattttcattcaaagtcaaattcctgaattagctgaattaaccatgtactacatgaacttggtatcattagcacgtttggaacgtaatcctactgtaaaaacagagattgcgcaaaaagggtttggaagttcaattccaacaggatttttggtgtatccaatctctcaagctgcagatattacagcttttaaagcgaattatgtgccagttggaaatgaccaaaaaccaatgattgaacaaacacgtgaaatcgttcgcagtttcaatcatacttataaaacagatgttttggttgagccagaaggtatttttcctgaaaatgaagcagctggtcgtttaccaggggtagatggtaatgctaaaatgtctaaatctcttggaaatggtatttatttgtctgatgatgctgatactgttcgtaaaaaagtaatgagcatgtacacagaccctaatcatgttcgtgttgaagatccaggacaaattgaaggaaatatggtttttcattatcttgatattttcggacgtgaagaagatcaagatgacatttcagctatgaaagaacactatcaacgtggaggtcttggtgacgtcaaaacaaaacgttatttgcttgatattcttgaacgtgaattggcgccaatccgtgaacgccgcctagaatacgcaaaagacatgggtgaagtattccgtatgcttgaaaaaggaagtgaagcagcgcgtgaagttgctggtcaaacactttcagaagttaaagctgctatgggaatcaattacttctaaaataaagtgaagcgaaactctaaagtaacaatttttactttagagtttttatttgttgaaaagcatttgttttaaatgagaattgcaaaaataatcagtctaataataggtagaaaataccatgtttttttaaaggtaatttggaaaaaaattgaatttattttattgacaaatgattttggcgtgttattatagtaacaataaaaaattagctggggggctaaaatcccctacaaatacatagaaaagagggttatttaatgtcaaattgggacactaaatttttgaaaaaaggttacacttttgatgacgtattacttattcctgctgaaagtcatgttcttccaaacgaagttaacatgcaaacaaaacttgcaaaaaatttgacattgaacattcctatcgtgacagctgctatggatactgtaactgacagtaaaatggcgattgcgattgcacgtgcgggtggtctcggtgttgttcataaaaacatgtctattcaagaacaagctgaagaaattcgtaaagtaaaacgctcagaaaacggtgttattattgatcctttcttcttaacaccaaaacattctgtttcagaagcagaagaattgatgcaacgttatcgtatcagtggtgttccgattgttgaaactcttgaaaatcgtaaattagttggtatcattacaaaccgtgacatgcgtttcatttcagattatcacacaccaatttctaaacacatgacaagtgaaaaattggttacagctcctgttggaactgatttggaaactgctgaacgtattcttcatgaacaccgtattgaaaaacttcctttggtcgatgaagcaggacgtttgtcaggtcttatcactatcaaagatattgaaaaagttattgaattccctaatgctgctaaggatgaatttggtcgtcttttagttgcaggggctgtgggtgttacatcagatacctttgaacgtgctgaagcactttttgaagctggtgctgatgccattgttattgatactgcacacgggcattcagcaggtgttcttcgtaaaattgctgaaattcgtcaacacttcccagaacgtacattgattgctggtaatgttgctactgcagaaggagctcgtgcgctttacgaagctggtgtcgatgttgttaaagtcggaatcggtcctggttcaatctgtacaacacgtgtcgtagcaggtgttggtgttccgcaaattacagctatttatgatgcagcagctgttgcacgtgaatatggcaaaacaattattgccgatggtggtatcaaatattcaggtgatattgttaaagctttggcagcaggtggtaatgctgtaatgcttggttctatgtttgctggtacagatgaagcaccaggtgaaactgaaatttaccaaggccgtaaatttaaaacataccgtggtatgggatcaattgcagctatgaaaaaaggttcaagcgaccgttacttccaaggttcagtcaatgaagctaacaaacttgttccagaaggaatcgaaggtcgtgtagcttacaaaggtgctgtggctgatatcgtcttccaaatgcttggtggtattcgcgctggtatgggatatgttggggctgaagatattttagcacttcacgaaaaagctcagtttgttgagatgtcaggtgctggtttaattgaaagccacccacatgatgttcaaatcacaaatgaagcaccaaactattcagtacattaatttctagaataattaattaaaaaaatctccgatgtgcttatgcctgtcagggatttttttgataacctttacaaagtgatagtaattgtgatagaatatacagctgtgttcgttttaaaatgaaaatttcttttgttttctgaaaaagcgttttcacacaaaatgaacgattattttcatatttacaacagtgtaaactttgtttacttagctgtaaaacatattgtaaaggagaaaaaatgcaaggtattttatatgcattgattcccatggttgcatggggaagtattggttttgtcagcaataaaattggtggtaaaccagatcaacaaacattaggaatgactattggagcacttttatttgcttttgtcgtttggttatttgtccaaccagaaatgtcagtatcactctgggtatttggaattattggtggtatgctttggtctatggggcaaaatggtcaattccgtgctatgcaatacatgggtgtttctgtggggaatccgttatcaagtggtgctcaattagttttcggtagcttaattggtgcaatcgtttttggtgaatggagtaaacctgttcaatacactcttggtatcattgctttacttttgcttgttattggtttttattttacaagtaaacaggatgctgaaaaagttgaaacgaatgaattgactgattttgggaaaggtttccgtgctttaacttattctactgttggttacctttcttacacaatcttattcaacaacatcatgaaatttgatgcgttggcagttatcttcccaatggctgttggtatggttattggtgcaatgatgttcatgaaattcaacgttaaatttgaaacagttgttattaaaaatgctatcgttggtttgatgtggggtgttggtaatatcttcatgctattagctgctgctaaagctggtttagctattgcttttagcttctcacaattaggtgttgttatttctatcatgggtggtattcttttccttggtgaaacaaaaacacgtaaagaaacacgttggttggcaattggtattgcttgttttgttcttggcgctgttttactaggaattgtcaaatcttattaatcgttgacaatgttgtcaacttatctgtaaatataacaaaaagctggcaaacgccagcttttttaattttcttgaatgttaccttgattaactgtaaagatttttaactcgtccggaagctgtgataggtggtcgaggcttgttgttgtaatgaaggtttgaacgtttttatcaataatcatttttaagagttcggtttgtctgtaattatcaagctcgctcatgacatcatctaaaagtaaaataggataatcaccagttactgtttttattaactcaatttcagccatttttagtgataagattaagctacggtgctgaccttggctgccaaaatttgctggcatatcattaatgaaaaattccaaatcatcacggtggggaccaacacttgtattttttttgaaaatatcacgctgatgatttttttgtaaagcttttaagaaatttggcttaatgtcatccctttcttggaaggaaacagatgacagataatggatactaagatgttcaatgccgtttgaaatggcataatgatagcggtcggcttctttttctaaattagaaatgaaatctaaacgatgttccatgacacggctaccaaaatcagctaattgctcatcaagcacagctaaaaaatcagtatcaactttttcagccgttttaagataagtattacgctgttttagcacgtggttataattagacaaatcagctaaataaatcggctttatttgccctaaatcaatgtcaataaattttcgacgaaggcttggagcgcctttgatgagttgtaaatcttcaggtgcaaaaagaacaacggtcattacaccaatatagtctgataacttagcttgttttagatgattaacttttgtaacacgtcccttacttgaaagactaatatctaaaggaacagtaccacttgaacgttgtaaaataccagaaaccagaagttctttggcatcaaaatgaatcaactctttgtctgttcgtgtgcggtggctgcgggtaagagaaaggaaataaattgcttctaagaaatttgtttttccttgggcgttttttccgatgaaaacattaagtccaggagaaaattcaagctcactagtcagatagttacgataattttttaacgttattttttgaatccacatgcttaagttcctgggaaacgaacgggtttacgttcatttgtttgttttgtttttccttgattttgttttttaacttttttatttttctgattgagctcttttacaatagcggcgacacgttctttttcagcaattgcttctaggtgctcttgtttttcagctgatgttggttcgacaatctgaatctcaacattttcttcgggaatggtgatggtatcgccgatacgaatttttttgccacgacgtttttcatcttgaccattaaaaagaaccgttgtttctactaaatacccttttatagccccaccactttggataataccaagttcttttagtaatgcttgtaatgtgatatagtcatcaaataatttgtattccattgttttctccattttataattcaagtaattataacataaacgtggtataattttagctaataatgtgttttttagtaaggaatttgcaatgaaattagttgagggtgttgaattacatcttatcaaaagtgaaaaatttaaaatgaatcacctaacttttcgcttttctggtgactttagtcaaaagacggttgcacgacgtgttttagtcgcgcaaattttagcgacagccaatgcggaatatccaacagctcagcgttttagagagcgtttagctagtctttatggtgcaacgttgtcaaccaaagtgtcaaccaagggactagtccatatcgttgacattgagttggcttttataaaaaatcaatttgtaatgacagatgaaaatctgttggaagaaatgattgattttctttaccaaaatttattttctccacttgtgacggttgagcagtatcagtctaaactttttaatatcgagcagaccaatttgattaattatttgaacgctgataaagacgatagtttttatagcagtgagttggggcttaagaaacttttttatgaagattctgcttttcaaacttcaaaatatggaacagccgaattagtagccgctgaaaattcttacacggcttttcaggaatttcagaaaatgttgcgtgaagaccgtttggacatctttttattaggtgaatttgatgattatcgtatgctacagttgtttaatcgttttccgtttgaagaacgtcataaagatttagtatttgactaccaacaagaatttacaaatgttatcagacaacaatttgaaactaaagacgttaatcaatcagttttacagctaggctatcattttccaatacgctatcaagatgaagaatactttacactactagtctttaatgggctgtttggaggttttgctcattctcgtctgtttacagaattacgtgagaaagaaggtttggcatataccataggaagtcaattcgatatttacacaggtttactgaatgtttacgctggaattgacaagaaaaaccgaaataaaacacttcaattaatcaataagcaattttcggatattaagatggggcgcttctctgaatcacttttaaaacaaacgaaaaaaatgctgaaagtcaatttaaaattgtcttgtgattctccaagagtaatcattgaacgtgactacaatcatcagtatcttacaggtaattttagtgttgataagataattgacaaaattgacaacgttagtaaagaagatgttttaaaacttacaagaaaagtaaaattacaggcgctttattttttggagggaaaataaatgacagaattaaaagagcaaattttttcagaaataaatgaaaaaatttactcggctgagttagaaaatggattgaaagtttttctgattccaaaacaagattttcaagaaagctgtggaatgatgattgtaaattttggctctcttgacacgaagtttacacatgatggacagtccaaagaatacaacgaggggattgctcattttttagagcacaaattgtttgaattggaagatggtcaggatgttgcggagctatttactaatgcgggagcaaatagtaatgcctttacaacgtttgacaagacttgctactatttttctgcggttgacaacctagaagaaaatgtgacacttcttcagcaatttatatcagaaacctcctttacagaagcctctattacgcgtgaaaaagatattattggtcaagaaattgacatgtatcaagatgatgcagactaccgtctttatcaaggaattcttgaaaatttatatcctaacactgcccttgctcaagatattgctggcacgcaagaaagtattgaaaatatttcggtggcagatttaaaagagaatcacaatattttctactccccacaggaaatgacattgttgcttgttggaaatttcgataaggacttgctatttaatcaaatcaaaaaagagcaaaaagaaaaggcaagtaaaaaacacgttgttaaacgacaaggtttggtgtatgagcaggtagtgccgaaaaagaatattcaaatggatgtcactcaacctaaattggcaattggttatagaggagcacagttgccaaagggaacttcaattttacgtcaagaattggcgttgcgattattctttaccatgttgcttggctggacatcaaaacgttatcagcagctttatgaaagtggacagattgatgattcctttgattttgaaattgaagtttgtccagattttcagtttttgattatttctttagatactttggaaccaattgcgatggcaaataatatccgtcaatatttgaataaagtatctcaatcaagcgatttggacgatttatcagaagaacactttaaaattgtcaaaaaggaattgtatggcgatttcttcaaaagcctagattctattgataacttatcagcgcaatttattaatcatttatcagaagatgaaacttacttagatgttccaaaaatattagcaacgttggattttgcagaagtcttgaaaatcggtaatgatttcttagcacatgctgatgcaacagaattcacaatcctaccaaaataaatcgaaatactttctaaaatttgctataatagacctgattatattttattaaaggaaacccgtatgagagaacaaacgattggtgagattttaagagaagctcgggtggcaaaacacctgacattagaagaagtcgaagaaaaaacagcgattccttcgccacatcttttggctttggagcttgaacaatttaaattaatccctaaagataagattgaaacttacttacaacaatatagcgaagctgttgagcttgacaccgctgatttgttggaaaaatatcatgaacaagaagttgattcatcagatgaggagcaagaagagtacgtagtagaatctaccactactaatactgagagtattgtgaaaacgccgcaagatgaaacaattagcattgcaaaatcagctagcgatgatagctttattattggctcacgctcaagccgttacaaaggaaaagaaaaaacaaattcttaccttccgattgtgatgctttgcttggtagccttgggaattttagcttttgtttctttcgtgacttggaatcaattgcaaagcgatagcaataacgcaagtacaagctactccgttgtccatagcagtagttcaacaacgacagactcaacatcctcagaaagttcttcttcaacaagtgagtcatcatcttctgaggaagatacttctttgaaaatgtccactgagggaagcggcaatagcttgatagtaaacttgtcaaatgtgacagatagtttaactgttgaaattagcttatctggtgcagacagtagttgggtgtctgtgacaaattcagaatctaatgattctggtactcttctttcgtcaactggaacaacaagttatactgcagttcttccttctggaacaacaagttctttgattactttgggagttactgaaggtgtgacagtaaccattgatggacaagaagttgacacttctgcattaacaagtacaacgctaagttatattacaattaatattcagtaaggtagaaaaatgaaaatcgattttacaaaaaaagaaaacattcctaatttattaacattaggacgtatcgtgatgattccgctcttcattcttatcctttgtttctggaagagttcgacagggcatgttgttgctgcaattgtttttgcattggcaagcattacagactatttagatggttatcttgcaagaaaatggcaagttgttactaactttggtaaattcgctgacccattagccgataaaatgttggtaatgacagcatttattatgcttgttgaattaaaaatggttcctgcttggattgctgctatcattatttgtcgtgaattagccgttacaggacttcgtcttttacttgttgaaaatggtggaacagtcttagcagctgctatgcctggaaaaatcaaaacatttacacaaatgttttcaattattttcttactatgccatttttcaatcattggcacacttttactttatgtggcattgatttttaccatttattcaggatatgattacttcaagggagcaggattcctttttaaggatacatttaaatgacattgaatagcattgacgttaaacatttaaaatttaaatatgatgataatcaggacaattacatcttggatgacttatcgtttcacgtgaaacaaggtgaatggttgtctattattgggcacaatggttcaggaaaatcaacaacagttcgtttgattgatgggctgttggccgctgaatcaggcgatatttttgttgaaaacgagcttttaacggaagaaaatgtgtggaacattcgtcagaagattggaatggtttttcaaaatccagataatcaatttgttggagcaaccgttgaggacgatgtcgcttttggacttgaaaataaagggattcctcttgaggaaatgcagtcacgtgttaaagaggcacttcaattagttggaatgtctgactttgctgaccgtgagccgtcacgtctttctggcggacaaaaacaacgtgttgcgattgctggagcaattgctatgcgtcccaatattattattttggacgaagcaacaagtatgttagacccagagggacgtttagaattgattcagacgataaaagagattcgtgatcagtataatatgacggttatttctatcactcatgacttagatgaagttgcattgagtgaccgtgtgttagtcatgaaaagaggaaaagttgagtcaagctcaacaccgcgagaactctttgctagaggagaagaattattgacgttaggactagatattcctttttcagccaatcttatctctactttaaaaaataaagggtttgaatttacagagaattatcttacggaaaaggaattagaagatcagttatgggaattactcttgaaagcgtaaattatacttatcaagcggggacaccttttgaagggcgtgccctttttgacattaatcttagtatcaaagagggctcttataccgcttttattggacatactggctcaggtaagtcaacgattatgcagctgttaaacgggcttaatgtgcctacggagggcgccgttatcgtagatgatataaaaattacagctgactctaaaaataaagacatcaaacctgtgcgtaaaaaagtaggacttgtttttcaatttcctgaaagccaactttttgaggagactgttcttaaagatgtcgcttttggtccacaaaattttggtgtttccatagaagaagctgaacaattagcgcgtgaaaaactagctatggttggtattagtgaggaattttttgaaaaaaatccatttgaattgtcaggtggtcaaatgcgccgtgttgcgattgctggtattttggctatggaaccagaggtgctagtcttagatgagccgacagcaggcttagaccctaaaggacgtcgtgagcttatggacttatttaaaaaattacatcaaaatggtatgacaatcgttttagtaacccacttgatggacgatgtggctaattatgcggattatgtcaatgtccttgaaggtggaaaattagttcgttctggttaccctaaagaagtttttcaggatgttgattttcttgaaagcaaacagcttggtgtgccaaaaatcaccaagtttgctcagcagcttgtaaaacgtggtttacagctagaaagtttaccaattactatagaagaatttgcagaggtggtgaaacatggataaattaatactcggacgttatgttccaggaaattctttgattcatcgtttagatccacgtagcaaacttttagcaatgattttgtacattgttattgttttctgggctaataatgtggtgacaaacattattatggttgcattcaccttgatagttgttttgctatcaaagattaagttgagctttttcttaaaaggtgttcagccaatgattggtattattttattcacaactttgtttcaaatgttttttacacaaggtggtcaaacctattttcaatttggttttcttaaaataacaagctacggttttagccaagcagttttgatttttatgcgttttgtattaatcatcttcttttcaaccttgctgactttgacaacaaccccgttgagccttgcagacgctgtagaatcacttctaaagccttttgttcgttttaaggtgcctgcacacgaaataggcttaatgctctcactaagcctgcgatttgttcctaccttgatggatgacacgacacgtattatgaaggcacagcgagcgcgtggtgtggattttggagagggaaatctgattcaaaaggtaaaatcaatcattccaatccttattccactttttgcatcgagttttaaacgagcagatgctcttgctcttgccatggaagcacgtggttaccaaggcggagatggacgaactaaataccgaattttgcaatggcacctaaaagatactttggctttaataatgttagttattttaggaattttgctattttggcttaagaaaagctaaaacgccctacttgtaggcgttttctttatgttaacacaatctaattgtaataattttaataaaagactaaagctcaggtaacattaaccctgtattatatatcctatactaatttgtaaaaaggagcatataatgcaaaaaaatactttaaaaagtaaatcgaaaactattaagttaggagttgctagcgcagcttttgcagcagcactgatcgccccagcagtcgctaatgcagattcttacacagttaaatcaggtgatactctttctgaaattgcctcaacttacaatactacagttgaacaattggcatcattaaatagtatctctaacgttgacttcattactgttggtcaagtcttagaattggattcaacagcttcaacaacttcaacaacagaaactacaacttcagcagctactactgatgattcattatcagcaacatctacagctgcaagtacagatacaactactacaagcacaacttattcatcaaacttgagctcagcagatgcagccgctaaagaaacaatcgcacaacgcgaatcaagtggtagctacacagctcaaaatggtcaatactacggacgttaccaattaacgatttcttacttgaatggtgacttatcagctgaaaaccaagaacgtgttgcagatgcatacgttgcaagccgttatggttcatggtcagcagcccttgccttctggaatgcaaatggttggtattaagattttagataattagttaaaaagatttgagagaaactctcaaatcttttttgtttgctcaaaatggctttaaaacagtatttttcaggaaaattggggtaagtttcaatgtttttgtaacatttttaacatattttcaatctccaagtaacaattaaattatatgatagaaaaaggagttctagagaggtatatagtttatatttatgtatagtaggattgctaaagcaaaacaaagaaaaataagaaatattatcgttagtgtgctcggagcaactttgagcttggctatgattattttccttattccaaaaatagaattattctcagatacgtttacaacacatgctgaggcagaggttgttaaatcaacatctacaagtctttcatcgactttaaatcaaacagtaacaagtacaacatcatctgagtctagctcagcagaagtcagcgaggtgtctgaagaacctgctaccgaagaagctactgaggtagaagaagtttacacagaatcagaagagccagttgttgaagatacgactgcgacagagtcagcttcttatacgacaacaacaagttcagaagtagttgatgcaacaacagcatcaaatggaaacactgctggtactgtcggtacagaagctgcggcgcaaatggcagcagcaacaggtgttcctcaatcaacttgggaagcaatcattgcacgtgaatctaacggtgatccaagtgtgacaaatgcttctggggcatcaggtttatttcaaacaatgcctggttgggggtcaacagcaactgttcaagatcagattacagctgctataaacgcctataatgctcaaggcttatctgcttggggttattaagctaaataaaaaagaaagcactaatcatcttatagcgatgatagtgcttttttaatgtcttgtggttgatgacagattatttcagcgccgtgttcttgtaaactttcagcagaaccaaagccccaagtaataccaagccttctaacgcctgttttctgaccaccaatcatatcaaattttgtatcaccgatgatgacagcttcggctgcttggattacttgttctgtaagacaagcgttaatcacatctgctttgtgaaaatgttcaggagttgaaccataaacttgcttaaagtttgaaatgacaccaagctcggtcaacattagcttagccattggttcgtgtttacttgttgtgacatagagagagtagcctaagtcattcaattcttttagtaggtcggaaataccagcataaagcgaaacttgatgcacacctttagcgttatagtattctctaaaagtttttattgcatggtcaatatcggctttctcagtgaaataattagcaaaggtaacttctaagggtggaccgataaatgttgacaattgcttgtcactctgtaaaggtaactgtaatctttcaaaggcgtaattaaatgctgatttgattcctggactggaatttaccaaggttccgtcgaggtcgaataagatagatttcatatttactctcctgtaaaatagtgtcaactttcgttgacaattttgtcaagatcgaatgttttgctactatagtattaaaatactaaatgcttagcaaactattctccaaaaatttgagcttgtaatcgtcgtcctgttggtgtggcagctaagccaccttcggcagtttcacgaaaggcagttggcagacttgctccaacttgatacatcgcatcaacaacttcgtcaactggaatttgagattcaatgccagcaagtgccatgtcagcagccacaagtgcaaaacttgaaccaagagcattacgtttaacacatgggacttcaacaagccctgcaacagggtcacagataagcccaagcatatttttgataacaaaagcaactgcttggctggcttggaaagcagagccaccagcagccttaaccaaagctgcggcactcattgcagaagcagagccaacttcagcttgacagccaccttcagcaccagagattgaagcattatttccaataacgagtccaaaagcaccagcagtgaataaaaagttcaactgttcttcttcagaaagttttaatttgtcaatagcagttgtcagaacggcaggtaaacaaccggcagagccagctgttggtgtagcacaaacaagtcccattttggcattcagttcattgacagcaatggcattgcggacagcggtcaagatagtggtatctgacaaagtcttacccgatttaaggtaggtgtccattttgacggcgtctccaccagttagaccactaattgatttactaggtgttagtccgtcagtaacagaatttttcatgacttgaaggtttttcgtcatgatgtgaatgatttcatcacggctacgcccacttaattccatttcggtggcaatcattagttcagcaatattaccgttaaaatctttatcggcttgttcaactaattctttaatagaataaaacattcttttcctttctaatcaaagaaattaacattgtgcaaatgtggaatttgttgaatctgttcaacagctttgtgacaatcacgagagtcaacttcgataatcatgattgctttttcaccagcacgttcacgagttacattcatttgggcgatgttgatatgatgttcagatagaatatctgtcactttggcaatcattccaggaatgtcttggtgaacaataattaaagttggggtattcatttttagcgatacagagaaaccatttaactcagttacctcaatatttcctccgccgattgatacgccagtaatactcatgcttttgtcacctttttcaacggtaattttagcggtatttggatgtggagcgttactatctttgagaatatcccaataaatgcgaacccctttctggtgagcgatttctaatgaatttttgatgtcaggattgtcagtatccatgccaagaatacctgcaacgagagctttgtcagttccatggccacggtaagtcttagcaaatgaattgtacaaatgaaaggttacggaatcgggaatttctccgaaaatagagttaacaatttttccaatacgaacagccccagccgtatggctactagacggaccaatcatcacgggaccgatgatgtcgaatacggattggaattttagatttttcatatctactcctttaagaatctatgcttacttattataacagaggaaggcaaaagggtaaacgataataaatgagaaaaagcattagaattaagtgtaaaagacttacataaatgaaatttcgtgttataatagtcttcgcgtggtttcacgcattcaaaatcgaccttcaaatcgatttttgaaaaactgggcccttcaagcctatgttcgaaaaaaatatcttgatgggaggattatcatgtcagataattcaaaaacacgtgttgttgtcggtatgagtggcggcgttgattcgtctgtaacggctctccttttgaaagagcaaggttatgacgttatcggtgtctttatgaaaaactgggacgacacagacgaattcggtgtttgtacagcaaccgaagattataaagatgtggcagctgtggctgaccaaattggtattccttactactctgtcaattttgaaaaagagtattgggatcgtgttttcgaatatttcctagcggaatatcgtgcaggacgcacaccaaatccagacgttatgtgtaacaaggaaatcaagtttaaagctttccttgactatgccatgacgcttggagctgattatgtagcaactggacattatgcgcaagtttctcgtgatgaagacggtactgttcatatgttacgtggagcagataataataaagaccaaacttacttcttgagtcaattatcacaagaacaattgcaaaaagtaatgtttccacttgggcatttggaaaaaccagaagttcgtaaaattgcagaacgtgcaggtcttgcgacagctaagaaaaaagattcaacaggaatttgctttatcggtgaaaagaactttaaagaattccttagtcaatatttaccagcgcaaaaaggtcgtatgatgactgttgatggtcgtgatatgggtgaacatgctggattgatgtattatacaatcggtcaacgtggcggtcttggtatcggtggacaacaaggtggtgacaatcaaccttggtttgttgtcggaaaagatttgtcaaaaaatattctttacgttggtcaaggtttctatcatgattcactaatgtcaactagccttgacgcttcaagtattcactttacacgtgatatgcctgaagaatttacaatggaagttacagcaaaattccgttaccgtcaaccagactctaaagttacagtgcatgttaaaggtgacaaagcagaagttgtctttgatgaaccacaacgtgccattacaccaggtcaagctgttgttttctatgatggcgaagaatgcctaggtggcggaatcattgatatggcttataaaaatggagtcgcttgtcaatatatctaattgacaaaggtgtaaagataagttgacagatttacttttgggatgatgctaggagattatcttatgagagtgggagttattcaagcgagtacaaggtcagatataaatgacctcttatttcaatcagtgcagaaagctgtaaagggactacacgaagttgttaactttggaatgttcccaaatgaaacagcaaacttttcatatgttgaagtggctgttatggtaagcttgttgattgaaacacaaagtctagactttgtggtgactggttgttcatctggtcaagggatgatgcttgcttgtaatagtttacctggcttgcgttgtggctttattcaaacaccacaagatgcttatctttttggtcgtattaataatggcaatgttgtttctttgccattaggcttaaattttgggtggtcaggtgagctaaatttacagtacactctagataagttatttgaagatgagttcggttgtggtatccaaaagaagacgctgaacgtaaacggcaagacgctgacaacttggttaagttagcgactatcaccaaacgctcttttagtgatatcctagatcaactcgatcaaaaccttctccgaaaaatcttatgccgagaaagtttttataactatcttatgactaatgggaaaaatcaactattgctcgaaaaattatcggcaattaaattgacattttaacttaatttgatacaataatcataacaataatcatgatggtcaaagctcatgagaattgtgcgtttttgccgcacaattttcgagggttttggctgttttttgtgtattaataatcttaattttatatttggaaaggaatgctttaagtagatttagctaatgttttattaatctgaatggataaaatttagctaagatttacttgatattgtaattgaatcatgacacacgaatttgctgaaaattatgatgtaattgttgttggtgctgggcatgctggtgttgaagctagtttggctgcggctcgtatgggttgtaaaacgatgctggcaacaattaatttggaaatgttgtcctttatgccatgtaaccctgcaattgggggttctgccaaagggattgtcgttcgcgaaattgacgctctcggtggtgaaatgggtaaaaacattgataggacttacattcaaatgaaaatgctcaatactggtaaaggtcctgcggtccgtgctcttcgtgcgcaagcagataaggctctttactctcgtacaatgaagcatacggttgagcaacaagaaaatttgacattgcgtcagtcaatgattgaagaagttttagtcgaagatggtaaagttgtcggtgttcgcacagctactaatcagaaattttcagctaaagcagttgttatcacaacaggtacagctcttcgtggcgaaattatcctaggcgagcttaaatattcttctggtccaaataacagcttggcttctattggacttgcagataatttgaaagaattaggtcttgaaattggtcgtttcaaaacaggaacaccaccacgtatcaaagcaagttctatcaattacgatgaaacagagattcaaccaggtgatgaaaaaccaaatcatttttcattcatgtccaatgatgaagattacctcaaagaccaaattccttgctggttgacttatacgaaccaaacaagccacgatattatcaataaaaatctttaccgtgcaccaatgttttcagggattgtcaaaggggtaggacctcgttattgtccatctatcgaagataaaattgtacgctttgcggataaagaacgtcatcaacttttcctagaaccagaaggtcgtgaaacagaagaagtttacattcaagggttgtcaacaagccttcctgaagatgttcaaaaagaattgattcattctattaaagggcttgaaaatgccgaaatgatgcgtacaggatatgcgattgagtacgatatcgttttgccacaccaattgcgtgcaacgcttgaaacgaagaaaatttcaggtctctttacggctggtcaaaccaatggtacgtcaggttacgaagaagctgctggtcaaggaattgttgctggtatcaatgctgctttgaaagttcaaggcaagccagaaatgattcttaaacgtagtgatgcttacatcggtgttatgattgatgacttggtaacgaaaggaacgttggaaccttatcgtttgttaacaagtcgtgcggaatatcgtttgattttgcgtcatgataatgctgatatgcgtttgactgagattggtcaccgtgtcggtttggttgatgatgaacgttatcaacgtttcttgaatcgtaaacgtcagtttgacaatgagttgacaagattgtcaactcttaaaatcaagccagttaaagaaactaatgcacgtattgaagcacttggtttcaaaccattgacagatgccttgacagcaaaagaattcatgcgtcgtcctgaaatcaattatgacattgcgacaagctttgttggtcctgctgaagaaaaacttgacagcaaagtgattgaacttttggaaactgaaatcaaatatgaaggttatatcaacaaagcccttgaccaagtagccaaaatgaaacgcatggaagaaaaacgtattcctgctaatattgactgggatgatattgattctatcgcaacagaagcacgtcaaaaattcaagaaaattaacccagaaacaatcggtcaagcaagccgtatttcaggtgttaacccagcagatatttctattttgatggtttacctagaaggcaagcaaaaacatcatagaaaagcgaatgattaagtcataaaattgtaatctttaaaccaatgacagctctatcaaatagggctgttttatggtataattgtaagctaagaggttaaccaatgaaaagatttcgatttgcaactattcacttagtcatgataggcttgattttattcgggattttggctatttgtgtcagactttttcagacggagtcagctattttagctgcaatctttttggcgctgtctttgcttgttgcattgctttattatcaaaaagaaacatatgagttatcagaacttgaacaaattgaattactaaacgaccaaacagaagtcagtttgaagagtttattagaacagatgcctgttggtgttgttcaatttgagcaatctacaaatgaagttgagtggtttaatccatacgctgaacttatcttcactagtgaagaaggagaatttgaggacgagctgatccaaaaaattattggcaataagcgtgaaggggatgccagccaaacttttgagttaaatggcaataaatattcatcttacattgattcatcttcagggattttttatttctttgatacatcaatgggaaatcgtcaactaggagatgctgcgcttttgcgaccagttatcgggattatctcaattgataattatgacgatgtaacagatgatttatctgatgcggaaatttctcaaatcaatagttttattgctaatttcatatcgaatttcacgaagtctaaaaatattttttatcgtcgtgtggatatggaccgtttttactttttcacagattatgctgttttaagtagtctaattgacgataagtttacagtactagaagcttttcgtaaacaggcaaaagaagagcgtgagttaccgctgactttgagcatgggggttgcttatggtgatgataatcatcagcaaattgggcaagtggctctccaaaatttgaatacggcacttgtgcgtggtggtgaccaagttgttatttgtgaaaatgatgagcataagaaaccattgtattttggtggtgggtcagtatctaccgttaaacgtacccgtacgcgtacccgtgcgatgatgactgctatttcagaccacataaaaaatgtggatagagtatttgttgtcggacatcgtaatctagatatggatgctcttggttcagcgattgggatgcagttctttgcaagtaatgtcatcgaggaagcctatgcggtttacaacccagatgaaatgagccctgatattgcaagagcagttaaaaggttacaagaagatggaaaaacgaatttaatttcagtcaaccaagctttacaactagtgacaagccaatcactgttgataatggttgaccattctaagattgacttaacgttatcgcaggaactttacaacagatttacagatgtcattgttgttgatcatcatcgtcgtgacaataattttccagaaaaagccatattgacttttattgaaagtggggcaagtagcgcaagtgaattagtaaccgaattaattcaattccaaaatgctggtaaacgtctaagtaaaattcaagctagtattttaatggcagggattatgttggacacgaagaatttttcagctagcgttacaagtcgaacatttgatgttgcaagctatcttagatctcaaggaagtgatagcattgaaattcaaaacatttctcaaacagattttgaggaatatcgattggttaatgaacttattctcaaagggcgtaaactttatgacaacattatcattgccagtggtggcgataatgtggtttacagtaaagtagttgccagtaaagctgcagataccatgttatctctagctggcattgaagcaacgtttgttattgttcaggttgctcctaataaagtggctatttcggcacgtagccgcagtaaaatcaatgttcaacgaatgatggaagaacttggtggcggtgggcattttaccctagcagcttgtcaactatcagacataactgttagtcaagccgaacacttattacttgaaataattgaaaatgatttaagagaaaacatggaggtagagtgatgaaagttatttttctagcagatgttaaaggtaaagggaaaaaaggcgaaatcaaagaggtcccaacaggttatgcccaaaactttttaattaagaaaaatttagctaaagaagcgactaaccaagctattggtgaattaaaaggtaaacaaaaatcagaagaaaaagcacaagctgaaattttagcagaagctcaagcgcttaaagcagagcttgagaaagaagccacagttgttaagtttaccgaaaaagttggacctgatggacgtacatttggttcaattacagctaagaaaattgccgaagaattggctaaacagtttggtttaaaaatcaacaaacgttctatcgagttagatcatccaattcgtgcaattggttctgtcgaagttcctgttaagttacacaaggaagtaactgctgaaattaaattaagcattaaggaagcatagtcctacgtttagaggttattaggggaggtgaagaatttggcagaagagccagaattgagagttcagccacaagatttattagcagagcagtctgtcttaggttcgatttttatctcgccagataagcttattactgtccgtgaatacattagcccagatgatttctataagtattctcatagagttatttttaaggcaatgattacacttagcgatcgtaatgaggctattgatgccacaacagttagaacaattcttgatgaccaaggggatttacaaaacattggtggcttgtcttacattgtcgaacttgtcaatagcgttcctacgagtgccaatgcagaatattatgctaaaattgtcgctgaaaaggcgatgctgcgtaatatcatctctaggttgacagagactgtaaaccttgcctatgaaggtgctacggattctgaagacgttattgcgggggcagaaaaagcccttgttgagattaatgaacatagcaatcgcagtggttttcgtaagatttcagatgttttgaaggtcaactatgaaaatttggaaatccgttctcgtcagacaagtgatgttactggattgccgactggttttcgtgatttggataagattacaacaggtttacaccctgaccaattgattatccttgctgcacgtccagccgtcgggaaaactgcttttgttttgaacattgcgcaaaacgttgggactaaacaaaataaaccagtcgctattttctctctggaaatgggtgctgaaagtttggttgaccgtatgttggctgctgagggaatggttgattctcaccaccttcgaacaggtcaattgaccgaccaagaatggaacaacattaccattgcccaaggtgctttggcagaagcaccgatttatattgatgatacaccagggattaaaatcactgaaattcgtgcacgagcacgtaagctgtctcaagaagttgagggtggtcttggtttgattgtcattgactacttacagttgattacaggaacacgtccagaaaaccgacaacaggaggtttctgatatttcacgtcaattgaaaattttagcaaaagagctgaaagtccctgttatcgcacttagtcagttgtctcgtggggttgaacaacgtcaggataaacgtcctgtgttgtcagatattcgtgaatcaggttctatcgagcaagatgcggatatcgttgccttcttgtatcgtgatgattattatcgtcgtgagggtgaagaaaatgatgacgctgtcgaagacaatactatcgaagttatcttggagaagaaccgttcaggagcgcgtggcacagtgaaattaatcttccaaaaagaatacaataaattttctagtatagcgcagtttgaagagcgttgataaatataaaattactttattaaggagcaaagtagaagatgagtgatgcatttgcagatgtagcaaaaatgaaaaaaatcaaagaagatattaaagcccatgaaggtcaacttgttgaattgacacttgaaaatggtcgtaaacgtgaaaaaaataaagttggtcgtttgactgaagtttacccttcattatttatcgttgaatacaatgaaaattcagatgttccaggagcaatcaacaattcttatgttgaatcatacacttattcagatattttaactgaaaaaacattgattcgctattttgattaatccttgattagaattatcagcaatagtagataaaaaggctttacaacgccttttttttatgttaaactaagctttgtgtgaaataatagcaggagagtatgaagctcgtcaacagttggctcttctacagtttttcttcttatagaaaagctcctagaagtcggaaaagtaatcttggctgtttagatgaaagtcaactgcacgaatcaggattctctaatttgttatttcctacaaaatttttattttataggaggacatttttaatgtcacgttatacaggtccatcatggaaacaatcacgtcgccttggcttgtctcttacaggtacaggtaaagaattagcacgtcgtaactacgtgccaggtcaacacggtcctaacaaccgtagcaaactttctgaatatggtttgcaattggctgaaaaacaaaaacttcgtttcacttacggtgtaggtgaaaaacaattccgtaacttgttcgtacaagctactaagattaaaggtggaactcttggtttcaactttatggttcttttggaacgtcgtcttgacaacgttgtttaccgtttaggtcttgcaactactcgtcgtcaagctcgtcaattcgttaaccacggtcacatccttgttgacggtaaacgtgttgatatcccttcataccgcgtaactccaggtcaagttatctcagttcgcgaaaaatcagctaaagtacctgctatccttgaagctgttgaagctactcttggacgtccagcattcgtatcattcgacgctgaaaaacttgaaggttcattgactcgtcttccagaacgcgacgaaatcaacccagaaatcaacgaagcacttatcgttgaatactacaacaaaatgctttaattctcagtttattgaagtatttaaaaccacggtcttcgccgtggttttttgtttttttataatagaaaagtcctttttgatacttcccttaggtttctcgcttttttatttctaggttcagacctcaaagcaaccagtggactattgaagaaatccaaggaattctcaaaaacttccgagatgtaggagaaacttcgtttctcttatctgcaaccttaaacaatctcccagattgtttaagcggcacaaagtatcgtttttgtgcttacttcattcgcaaataatcctgaaatcgaacagtgagacaacaattgtttgcaacttattttgagttaaaagtaagtttgtctacattcagagtcgccaaaaggtgactttaagaatgggtggttatagtgatagtggtaaaagttttaaaatgaggttagtcatttggcgaggagattcttttttgccattagctatccaagattggcagaggccaaaaaaggcgtaggcaaagtagatactactgtattctttttcgacaggggaaagttcttcacgcccaaaacgattttgaaaatcagtgttgataaagatgcgcaccttattaataataaaagcttgaaattcccgcgtgccgttcgccgaaattaaggcagatagcaattgctcacgttttagaaattcaaaaatctctaaaaacgcttgttctttattgccttcgtgtttttcaaaaatatattcaacttgattgaaaagggtttgttgacaggaatcaatcaattcaaatttatccttataatgtgtgtagaaacttgaacggctaatgccagcttctttagcaattttgatggtggtaatgtcgtcaaaactctctgtctttaaaagggtgaccatagcttcttgaatggcttttttggtgttagctctgcgattatcatttgccataataaaaatcttttgaacacttttagacagagtgtccaaaaactccttcttttgtcttgaaattattttatatctctgtataatatattttatcataatttttgaacactgtgtccaaattaggagaaaatatgttagaagaattaaaagcacttataaaaagcccaaaactttgggtaacaatgattggtgttgctcttattccagcactttataacttatctttcttgggttctatgtgggacccttacggaaatgttgatgatttaccagtagcagttgtcaatcaagataagtcatcaactttaaatgaccaaacgctatcaatcggtgatgatatggtggacagcatgtctaaaaataaagctttagattatcactttgttagcgcagaaaaagcagaagagggtctggaaaatggtgattactatatggttatcacattgccagaggatttgtctgaaaaggcagccagccttttgacagatgaccctgaaaaattgacaattaattatcaaacaacagctggacgtagctttgtcgcttctaaaatgagcgaatctgcgatgaccaagcttaaagatactgtttctgaaaatatcacagaaacttatacaaaagctgtattcaagagcatgtctagtttacaagatggtttacaagaagcaagtgacggtggcaatgagttgctctcaggaagccaacaacttgaatctggtagtcaaaccattacagataacctcaacacagcagcgtcaggcagccaaactttagcagacggaacagcgacactttcaagcggcttgacaacttatacaaacggcgtgtcaagtttagcgagtggagcaaatgaattagatagtaactcagcagcacttgtaagtggtgtagctcaactaaaagaaagttctgcacaagtacaacaattagttgatggtgctaatagtttaaccgatggtttacagaagttagcaacagcgacaacactttcagcagaagaatctgcaaatattcagtcattaatttcaggtttaccacaattaaatgctggaattcaacaattaaatgcttcagtttctgagatttctactgaagttgatactacaaaaatttcgactgctttaagtgatattgcttcacaagctcagggaattttgaaggcagaagaaaaggatagttcagccagattgactgctattaaagaaacagctgcttatcaaagtttagatgcaacacaacaagctgagttagttaatgcattaaatacttcaggaaatagtgttagtcaacaagcacagcaaattttaacagatgttcaaacaatgaaaactgctttaacagagttatcatctttatcaagtaaggtaactgagttacaaacgggagtttcccaaattgcaaatcagtcaaatgtagcattacctggtgctgttacagccttgacaacattatctactggtttaaatcaggttaatacagctgctacaacacaacttgtccctggaagtagtcaaattgcttcaggaatctcaacacttaatactaaactaagtagtggcgcaagcgaattgttgacaggggtaacaacttatacaagtggagtttcccaagtagcttctggagctaatcaattggctgctaacaatagtcagttgaccagcggagcttctcaattgcaatctggtgcggaagaattggcttctggttcaagtcagttagctgctggtagtgatacgttgacaagtggcttgacaacattgacaagtggtatttcaacattgacatcatcactttcagaggcaagtgaccaattatcactcgtttctgtaacaaataagaatgctaaattggtttctaaccctgtatcaacaaaagaaacagataatgatagcgtgaaagtaaatggtattggtatggcaccttacatgattgcagtatcacttatggtagttgccctttcaacgaacgttatctttgcaagctcattgtcaggacgtcctgtgaaaaatcgttttgaatgggcaaaacaaaaactctttattaatggattgatttcaacggttggttcattagtattgtatggtgctattcaattccttggatttgaggctaactacgaatggaaaacaatcctccttatcatcttaggtggttggacgttaatggctcttgtaacggctctagttggttgggataatcgttatggctcattcctatcacttgttatgctattgcttcaagtcggttctgcaggtggttcatatccaatcgagcttagtcctaagttcttccaagttgttcacccatatatgccaatgacttacattgtaacgggcttacgtcaaaccatttcgatgacaggttcaattggtacacaagtcggtgttctttcagcattccttgttgctttcatggtacttggacttatcatttacagacaaccaaaaacagaaaattaagattactagattgaggaaaacgttcattttggacaatttcttcaatctttttttgatgtgaacgatgttctcagtttttacaatcagattatttgaaaaatgaagggaacttttatacacttaatgagttaactagagaatgctgattaagacagcctttctttacaatatatttacagcgatgtaaatgattaatttgctatttagattgaggaaacgatgtcacttattactattattttgtcattattggttgctttggaacatttttacattatgtatttagaaacagttgcaacacaatcacctgcaacagcgcgtgtttttggactatcgcaagaagaattagaacgtgagtctgtaagtaatttgtttaaaaatcaaggtgtttacaatggcttgattgccgtttttctgatttacggtatctttacagctaatgctactttggtaactgtttttctagtaaatgtcgttcttgttgccctttatggtagcttgaccgcagaccgtaaaattattttaaagcaaggcggtttagccattttagctttactgacgttgttattttaaaacttaaaaggcatcgcatttgcgatgccttttaagttttattgaactgtaatgtcaccaacgtttccgtcgattgtcaacgtgtttttacttgattgatttaagtttgaagtgatatcagcatcgcctagaagatttgtcattaatactttcaaatctttgctggcaagagtaatgtcaacctcgccagtagtcattgttatggtgttatcatttttgaaggtggcagcattggctgaaaaatctcccatgcttaactcaaaggttgtgtcagaagcttggctattttctaaatcaatatcacctgttgtaattgaaaaggcgatgtttgctaagttgctgttctcaatttcagcgtccccagaggtgatgtttactgtccctgaattgagggttgtattggtcaatgttagttctccagccagaagtttgagcgttgcggtatcaagtgaaagctgactgatgtccaaatctcctgagctaagattagctttgactgaagtgaggtctgtatcctgaggaacagatataacgattgtatgtgaattttcgataataccagttttagcaatgtcaataatatctcttaaactcagaaaatgaatgtttgcattccctaattgggtacgagttcctgtttgctttacagtaagggtgtcatccttgacttcgtagttgacaggtgtttttttgttgtctgagtaagaaataaagggtttgtcaatattggcctttgaaatgatgatatcagatgttgtgctgtcaatatcaattttactgaaactgtcaaggttagctttttgatagtttacattccctacaatatcagtgctattttctaaatcagaaagtccaccagttgcgaaaccataacctgcaagggctgctcctaataagctacaactaataccaatgcctaaaatagtctttgtccacgatttcataattttctccttttgttttctgtctttcgtgctaaattgacaatgctacgtccaactactttacaaacagctcctgcagcaaggagggttagtaatgataaaccgagagctaaaagtcctagaccaaaactaagagcagttgcagaaaatgaaatgttaaggtaagaccagctatcaaatagcatgtaaattccagaagtcaggaaggcaaccccaagggaaagaacaacagcgatagccgccaccccaagagctaggatagtgatgacggctaagaaaagaacaagagccagtgggagagcaacaggggtgataataaccgctaaaatagcaagccaaaccatagatactctgcttttaggtgtcttttcttggtcgatgattttttcgtcaagcaaacgactaatgatgtctcgcgccgcttcttttggtgttccaagttcggcgataacttgtgcttcattttctggaccagcttcttcaaagtattcactaaagtagtccatagcttcttggtaatcctctttgggtaacttacgtaggtatttatctaattttgctaaatagtcaacttttgtcatcctctaatctcccttcaataatctcatcgactttttctttgtaccgttgccattcttttttgagaaaggtcaactgttctttaccagctgctgtgatagcataatattttcgtttacgtccttggtaggcttgttgataagtggttaaataaccagctttttccagtttttttaaaattggatataaggtggattctttgatgttagcaatttgcttaatggtttggctaatggcataaccgtaagagtcgtctttgtcaacaatggctaaaatgaggaattcgataacagttgccgaagttggaaaatacatgaaaactcctttttgatatgtaaaaattttatatataattattttacatatagaatatagaaaaataagcagcaagtcaagcataatgtataagaattttatatgtaggagagttcatacgtgtatttttaatgctattgaggtctattaagcttaaatagcgataattagttgacaaaatccactaaaaaccttaaaatatagttgataaagtccactaaaaggagaaaataatgccagatagagaaaccatttatgcgatacgtgcctttaatcgcatgtatatgccttctatgaatttactcggtaatcattatttgggttctgagtattccgtgacggaagcaaggattttctttgaaatttatgaaaatgaaggctgtacagcaacacatatcgcccaagagatgaatattgataaaagctatttgagtaggattttgaaaaatcacgagaaaaaaggttatatttatcgtcaaacgtcaaaggaagatgggagagcttatcatctttttttgactgatgcagggaaattacgtgcgcgagattttattgaaaaatctaatcaagaaattggcgatattattgcgacattgagttattcagagcagaaacaattagcagaagcaatgactttaattactaaaatattgggaaaaaattcagtacaaggagagtagtggaatgaaagttgtaccgtatgatgaaaaatataaaaaagattttgtggaaatgaaccttgcttggatttctgaaatgtttacggtagaagcagaagatgaacgcgagttaactaatattgagcattatattgaaaatggtggtcagattttctttgctttaaatgatgagggagctgttatggcatcgtgtatggtcgctccaagagaagatggtgattgggaaatcatgaaatttgcagcaaaaagcgaatttgctggcagcggtgcagggagtgcttgtttaaaggcgtgcattgagtatgcggagtcccttcatttgccaaaacttatcattgtttccaatcgaaaatgtctatctgctgttcatctttatcgcaaatttggctttactgagattcctgttgataaagaaagatttccttttgaacgtggtgatattgcctttgagaaagaattataacgtgtaaggaaagattagcatgataatagtacctttacaacggtgtcaaccttgttgttaagtagtctttgataactcttagtgtacacaagtgacaaacattgttctttacaacaactttacagtagctgaaatcagcttatcaaaaatgcaaccgttacacacggttgcatttttgattattaatcctcaagaacagtatattcttgaacgcttttctttaaaataggtgaatcttcttttctgaagtgttgctctttgtgatgttggatatgttcaggacgtttcaaccaagctttgaaatcgtcttggttgtcccaacgtgaaacagcagtaaaggaaacactatttgtatcagaattatcttgaatccagacctcgtttcctaaacatgtttcccaatttttgagcgagatagcgtcgttgcggaatttttgttcaaatttatctttagcagcagcttttacttcaaaagtaactgttttaataatcatatgttattcctcctttaggttactttaattatacaaggagaaactaaattttcaaaatttttgagataaaaatgatttggtttaatatccaatcagtcaaaaatgctatttttgaactaaaaaagcctagaaacgttgatttcataagcttttaatgtattcaattatttaacttcagtaaaggctcagaaatgttattttagcgcgtcataaacgctgttatatcaaggtttatggattttacaatattaaatgtagtcatataattaaatcttttttttgagattttggcatagggtattatagagctctctgttcatgctagattagtgacaaattatactttatctacattactaaatttataacagtttaaaactatgttctagggggagtctctgagaaaattatcaaatgtttttttcatataaaaaaatacggtgtatatttatgtttgaaagtaaataaaaagaaattgtataattttgttatgataattcaaaatagcacacatattgttgtaagtaacttatataaatattatggacaattagacaaagatttagtttcattaaactcaatagcgaaatatattaattctgaaaatttatcattgaatattttaaaaaattggtccagtaatagatcctcgcctagtttgtaccaactaaatgagctagcatattatatgtctgttcatccttcacaattattgattgaagatatacagtttgctattgatactcctatttggaaagataatattattgatgtattctattcaaattttgaaaagtataatgaaaagcacttaaattggtccaatgactttgatgaatcattaatgtcatatcggacttatctagaaattttacgttcacgaagagaatcgattagtttgaagaaaatggacattattgcaacaattttaggaataaaaacagttagtttattggaggataacaattgagaaaaaaagttaattcacaagaaatcaatgataaaattactgatgtattacaagaagtggataatgttattccgaatgtaatgcgaaaaacttattcatttaaaggacgtaagtcaccggatattatctctaaagtattaagtgtacttactaatcctactgatgtaatttttgatccatttattggtagcggtacagcgattataggaagtaaaaaagcaaatagaaggttgataggtactgaattagataattttacttattctattaataaagtactttttgaacggattgatgctcaagaattggataaaagtataaaaaatgtagaagagagatcaaaaaatgcaattctaaatttatatgaaactgagtgctgtggtacccctaattttataaaaaaattactttttgacccacaaaatgggaaagacggttactttaaccctaaaactaatagggaaataaaaaatgggaagaatataaaattactatttaaatgtcctgtttgtggtagcttcgataaaaaattttctgaatttgattggaataagatacaagaacaggaaagtatatcggcagcagaatttccaacagataaattaattgaaaacagtagaataaatattactaaatctactggtgcagataaatatgatacattcttttcacatagaaataaactagcccttttaaaattgcaagaagctatatcagagctgccttcatcaaaatcaaaagattttttgcaattttgtctagtttcatcattaagtttagcaaaaatcgctatgtatggaagctctactgacattttatatcatgttgttttagaaaaagcacaagatatgaatgtatggtatttattcgaacgaaagattcaaaattttaaaaaattccaggaagagtttaaagacattttagtagatagtttgaatgattcaaaggattattcaatttataatattgattattcaaactacctcgataaaaatcaagagttaaaagtcaatgcggttgttacagactttccatatacagaccaagtaccgtatttagaaagaaatcaattgtttagggtatggttagagcatttttctgatgaaccagagaagtataggctaacagaagatatgttgaataatgaaattgttgtaacaaatgcacctaaacgccgagaaaaaaattgggagagatatatcagtgatctagataaaatgtttaggaatttttctaatattttaccagttggtgctcctatggtattttttactaagttaggtaagaaaaagtattttaatgtttttggtaagattgttgatttagcaagaaaaaatggatttgaatatgttactagaattagtgtagaaaaaaaagatcctacgcttcgtaaacaatcagcttttcggaatacattaattaatgaagtcattatagtatttcaaaagttagataaggaagaacaatatttatatattgaggatcaaaactatgaaaataggattatcgatattgtatataaaacagtaaagagattaatagatacccctattacaaaaacagagctgattcatagaatttctgaagatattaagcatcttggagaacatgttactcctaaaatgataagtagaattgatcaagttatagaagataatttttacgttttgtctaattctgaagtccaactttctaaaaaaatcttatatttggatcaggaagataatgctactttatttaaaaaactttatgaacttgtacctatctatgtagataaattactaaaaaagcaaaagaaatttgtcctagaagatctttatcttgaactaatagatgaattatctgatggaaataatcgaactttccttgatataattaatgatgataaaaatattgaaaagattagttcgctattattagataaagcagatatcgaaggtgatttttatgtaaagaaaaaattaccaattgaaattaaaaaaggcgccattgatattgcaactatggatccgtatgaatttgaagatctttgtaagcaattatttgaaaaggcaggttttgtaaatgtttatagaaaaggtggtagtggcgacctaggggttgatatagttgctcaacagtttaatggaaatacaaaagaacattggttaattcaatgtaaacgctgggttggaaatgttgatgcaaccccactacaacggttagtctcggagcgagaacgtttaggtgctcaaaagattgcttgttatacgacttcaaattatactaaagatgcgaggaaaatagcagaagagcaaggtgtgattatcgttgatggcaaagagttaattcaaaaattagataggtattttaaggggaaatactataattcaaatatataggaaatggcatcttcaattattgaagatgccattttgcagtacctttattccaaataaaatattcttcaaagatttcaactagagattcatagtttttagccaatgtttctaaccaaccattgctaatcagtatttccattaatccaaaatcatacagctcaggtgttgaaagctctccgtttatttctaataatttcttggcttctaaataaagattatgtgttatttcttctagagaaatatttgaatcatatgtttcgatttttactccagtattctcaaaaaataggattgcatctccagatagagatttttttggactaataatattttttacagtttttgatttttttatatgctcttgtgtaatatatttaaatccattttgttcaagaatatttatcaattcaacccaaactgataaattattatcatgaaaaaataaacacattatagaaccttgttttaactttttgctgcacagtttaaatacttgatttagaagactaaagtactctgattcatctcgtttgcgtgtaggtgaaggagaaaccacaatttcatcatttaaattataattgagattgactataggtttatatagctgcatgtactcagaatataatacctgatctttgtaaggagggtcagtaattattaaatcaactgaatcgtttggaatatctatatctgtaatattttggcttcctttggttaaaagaagtgcggaattaggaatgagctctggatttgattcgactatcttagaattagagtagtgttgtctactatatgtagaagcttttaggatatttttagatctctttttaaggatatcaataatattcttttcaacacaattttttttaggaatccagagcggccattgagagttagagtgtaggtcagtgatttttgataagtgaatagctgacattaaaagatagtttaatagcttagaattatccattgtttttatatatcctacaacttcattaaggactgagaagtttctaggagtaaaaagatcagataaatgatcattttcaccaacagcaatcttactattctggattaacttttcatcaggaatatatttagagcagtgcaattctagcatcttttctttgtcttttttttcagcagtttttgtctttttaccgcaattttgacaaatatagtttattacttttatatcatattcatttactgttctaattggtttatcgaaaacgacctttgtaatagtggcttcgttagacccacattgttcgcatgtcgtttggtagtacggagcgagttcattaagtttgttatcgaagtcagataaaacttcctttatattttcttgttgaaattcgttaataatattatcaacgataaaacttggcatgtcattaatatcacaaccaatacccattctgtttttggaatttttgattgtttctaagattgtgacacctgaccccataaatggatcaaaaattatgtcaccttccttcgataaattttcaatcaatttttcaataacattaaatgatttttgagaccaatacaaatgggtattataaattggattttttgaggttggtattatattttttaactcttgttttaaagttaaaagtgaatttggctcattactattaacagtaggaccacaaatgattagatactcaaaaactttttttccagaactgtttcggtgatttgcatgtttataactctcttcagcaattgttacgttgttactaccaaaaatatttttagttaggttaattaattcttcgattgaaacagtatatctatctgtcttttgattaattgtatcttcggggtaagcatagctcaatgcaagaattatattatttgttttacaatactcacataattcagcaattctatctttcgcagtactttttttactaagatcggactgatttctaccttcagtatataagccagttgtatattttcctctggaaatagttggttttggaaagtcgtatttagctgcgatattcaacagatgataataccgagaatattgcatgtcagtatatggtggatcagcataaattaattttacattgtagttggataaatagttattcttggtaaactctgtaatgtctagattaaaagttttatgttttagcttgtatttatttttttcggtaagcgtgtaagtaataaattcttgtaacttaatattaagtaaatggacaatatctttttttcgttgttttaggtgtcgtttttgatttttattagggtttaatggctgagccatatgaccgtctttggcaaacacagcttctttcatcgcataaaaaaggcaactaaataaggtatcgctaacatttttttcctttatcgagtgaatgctctcaatgattgaatcaatgacgatagactgttttattccaaaatacgagcctgaatagtagtaggtgaaaagattataataccctcttgattttaaattttctacattgatttcttcatctatgttattccagattgttggaaagtgattgtataatcttataagttgagtattatcttctaaatttatatattctaattcttttgagagaaaacttttaaagttttttgaatttttttcgatatttttagttaaagtcttgttaaaattggcagcaacaagatctaatacttctgcctcaggtgtattcagtaaagctgatgaaattatagtagcgtacaattcagcatcatttgcaaaaataatattttcatccttaaatgctgagccgacacttccagagcctgaaaaaatatcaacaaatatatctccaggcgttaagtgggtttgtaaattagtttttaagaaattgattaatgaagacttattcccttgatagttaagtattgttggtgcagacataatttctccttaattttacattttagcacttttttatcatataaacaaattacaaataaaaaaatagcagaaaaattcccgcatcgttttttagactatttctagatattgaaaatctaaattactaaattcattttaatacactacattgaatttgaaaaagaaaaaaccctgattttacagggcttctgatactcactgacgtgtaatgacctattatttaacttcagtaaagattacgtgtttacgcaattttggtgagtattttttcaattgaagacggtctggagtgttacgtttgttttttgaagtaaggtacaagcgttcaccagattctttgtgttcaagtgtaatatttacgcgcatggtatctcccttctattatttagctgctttagcgattttacgtcctttgtagtatcctttaagtgatacacggtgagaacgtgagtaatctccagtagtttcgtcaaatttaactgatggagcagtcaatttgtagtgtgtacgacgtttgtttttcttcgcttttgaagtgtgacgtgcaggtactgccatgttttatttcctccgataatatttttttgttcttgatttttaatcaactttaacataataacatatcttttttgtaaagtaaagttacttgacaaaaaaattgtaaataggtgcgagtgtggttattaatgcttggctgctcgttaaaaacgaaagtcatcaaggaataattcataagaaaatcctaaaaaagaacagactattcttctgtataacttgtttttgtgataaaatagaaatgattgaatcgctacaatagtagaaaggaattaggggctaaatttgtttaagtttggtgccaatatgtcttaaatttatgaaattacaaaaacctaaaggaacacaggatattttacctagcgaaagtgctaagtggcaatacgtggaagctgttgcgcgtgaaacatttaaaaaatacaattacagcgaaattcgtacaccaatgtttgaacattatgaggttatcagccgctctgttggtgacacaacggacatcgtgacaaaagaaatgtatgatttccacgataaaggtgaccgccatattactttgcgtccagaaggtacagctcctgttgtgcgttcttttgtggaaaataaattatttgcaccagaagttcaaaagccagttaagatgtactacatcggctcaatgttccgctacgaacgtccacaagctggtcgtttgcgtgaattccaccaagttggtgttgagtgcttcggttcagcaaatcctgccacagacgttgaaacaatcgcgatggcttaccaattgttccaaacgctgagcattaaagatgttacgcttcatttgaatactttgggaagtgcagctagccgtgcggcatatcgtcaagctttgattgattaccttacgccaatgcgtgagcaattgtcaaaagacagtcaacgtcgtttagatgaaaacccacttcgtgtccttgattcaaaagaaaaagaagacaagattgctgttgaaaacgcaccatcaattcttgattatcttgatgacgaaagccaagctcattttgatgctgtgcgtagtatgcttgaaactctcaatatcccatatgtcattgatacaaacatggttcgtggtcttgattactataaccacactatctttgaattcatcacaactgttgataaatctgaattgacaatttgtgctggtggtcgctatgacagtctcgttgaatactttgacggaccagaaacaccaggttttggttttggacttggtcttgaacgtttgcttcttatcctcgaaaaacaaggtattgaattgccagttgaaaaagaaatggatgtttacattgctgttttgggacaaggtgcaaaccttaaagcattggaacttgttcaagctatccgcaaccaaggtttctcagcagaacgtgactaccttggacgtaaaatcaaagcgcaattcaaatcagcagacgcctttaatgctaaaacaattatcactttaggtgaaagtgaaattgaagcaggtcaagtagctgtgaaaaataataaaactcgcgaagaagtgaccgtaagctttgacgaaattacaaacaacttcgctgaagtattgaataaattgggttaaatttcttctttatacatacttaggcactttaattattaatgaaaaggcttaagtgagaaaagaatttaaaaaactcccccgcatgggtggggtttttacgtgctttttgctataataggtgggaatgaataaattaaaaaacggagaaacatatcaatgaaacgtacaatgtatgctggtcgtgttcgtagtgaacatatcggccaagaaattactttaaaaggttgggttggtcgtcgtcgtgatttaggtgggcttatctttatcgaccttcgtgaccgtgaaggtatcatgcaattagtcattaatccagaggaagtttcaagtgatgttatgaccacagctgaaagccttcgtaacgaatttgttatcgaagttactggtgaagttgcacaacgtgaacaagaaaataaaaacttgccaactggtgctgttgaattgaaagtatcagcattgacagttttgaatactgctaaaacaacaccttttgaaattaaagatgatgttgaagttagtgatgaaaatcgcttgcgctaccgttatttggatcttcgtcgtccaaaaatgcttaacaactttaaattacgtgcaaaagttactcactcaatccgtaactacttggacgagttagaattcattgatgttgaaacaccaatgttgacaaaatcaactccagaaggtgcgcgtgactacttggtaccaagtcgtgtgagccaagggcatttttatgctttgccacaaagtccacaaatcacaaaacaattgttgatgaatgctggttttgaccgttactaccaaatcgttaaatgtttccgtgatgaagatttgcgtggtgatcgtcaacctgagtttacacaggtcgatatggaaacatcattcttgtcagaccaagatatccaagatatcactgaaggaatgattgctaaagtcatgaaagatacaaaaggaattgatgtcacattgccattcccacgtatgtcttatgacgatgcaatgaacaactacggttcagacaaacctgatactcgttttgaaatgcttttacaagacttgacagaagttgtcaaggatgttgatttcaaagtgttctcacaagctccagttgtaaaagctattgttgttaaggggaatgcggataaatactcacgtaaaaacattgataaattaacagaatttgcaaaacaatttggtgccaaaggtcttgcatgggtcaaatttactgatggtgcgattactggaccagttgctaaattcttaacaagtatcgaagataagttgacagtaagtttacaactcgaagaaaatgatttggttcttttcgttgccgatactcttgaagttgctaataatactcttggtgctcttcgtactcgtatcgctaaagaacttgacatggttgacaactctaaatttaatttcctttgggttgttgattggccaatgtttgaatggtctgaagaagaaggacgttacatgtctgctcaccacccattcacattgccaactgaagaatccgctcatgaattagaaggtgaccttgctaaagtacgtgcagttgcttacgatatcgttcttaacggttatgaacttgggggcggtagcttgcgtatcaaccaaaaagaattgcaagaacgtatgtttaaagcgcttggctttacagcagaagaagcaaatgaccaatttggtttcttgttagaagctatgaactacggtttcccaccacatggtggacttgctatcggtcttgaccgcttcgttatgcttcttgctggtgaagataacattcgtgaagtcattgcattccctaaaaataataaagctgcggatccaatgacacaagcaccaagtcttgtttcagataaacaattagatgaattggctttagcaatcgaaaacaatgattaagaaaacatctttgaaaaagaaaacgaagtttattgttagccgttgggcagaaagatatggtctgttaaagacaatgcagagcatttcaagagagaagtatgcggaaaaagtttccgcttctcttttttatggtttgctatcggcaatcgcggttaatttcttcttccaaccaggacacgtttattcaagtggtgcaactggttttgcacaggttttatcggcgattagtgagcgtttaattggctttaggttgccaatttcagttgttttttatgcgattaatgtgccgttgctcgttttagcttggtataaaatcggacataaattcactgtttttacactcattacagtttcgatgagttctttctttattcaaattgttcctgaaattactctgacgactgatcccctggttaatgccatttttggtggtttggtcatggggactggtgttggctttagtttaaaatctcgtatttcaagtggtggtactgatatcattagtttgaccattcggaaaaagacaggccgtgatgtgggaagcatttctctcatggttaatggtgttatcatgatttttgctggcattttatttggttggcaatatgccctttattctatggtgactatctttgtctctagccgtgtgacaaatgctattttcactaagcagaagaaaatgcaagcaacgattgtgactaaccggcctgaaaaggtaattgcgatgattcacaccaaattacatcgtggggtgacacaaatcaatgatgccgaaggaacttataatcatgagaaaaaagcaattttgttggctattattactcgcgaggaatataacgactttaagtatctgatgaaaaaaactgacccaaatgcctttgtttcagttgctgaaaatgttcatattattggacgttttgttgaggattaagaggttgagaaagttctcagcttctttgtttatggcgttataatttacaagacgcagaaaattttgttttggaggtatgagacatggttcgtgaaaagcttggacaaataagaagtttggtgttaattgccataggtgtagcaatttatactttcggttttgtcaaatttaatatggcaaatgctcttgctgaaggtggggttgcgggtgtaaccttgattgcccatgctctttacggaatcaaccctgcttattcgtcacttattttgaatgttcctttgttcattctaggggctcgaatttttggacgaaaatcgctagcgctaaccatttatggcactgttttgatgtcatggtttatctggttttggcaacgtgtgccgattcagattgttctcgaaaatgatatgatgttggttgctgtcgttgctggtttattttctggtgtcggtagtggattagtctttcgttacggcgctacaacgggcggaacagatattatcggacgcgttatcgaagaaaaattcggtttcaaacttggtcagacactgctttttgtcgatgccgtggttcttacagcgtcgctggtttacattgatttacaacatatgctttacacgttggtagcaagctttgtttacagtcaagttctgacaattgtccaaaatggtggttacacagtacgtggcatgattattatcacacaaaaatctgaagaagctgcgcaagctattcttaatggcattaatcgtggggtcacttatctgaatggccaaggggcttactctggaaacgaaaaaaatattttgtatgtggtcttaaatccaggtgaagtccgtgatgttaaagccattatggcagatttagacccagatgcttttatctcaatcattgatgttgatgaggttgtgtcatctgatttcaaaattcgacgaaaaaattatgataaattgtaattaataacgaaaagaagaggtgaattttcatttgccttttctttttttgatattatagtctgacaatttaatgatatgctattgaaaattttgaaagcgctttttatttagctctttttatggtatgatgagccttgtaaggattgttactggtcaagcaggcaaaacctaaatctaacaagaaaattaggaatagcaccaatcgttcctctatttttctgttgattagatttaggtttttgtttttgtcagaaattctttggagaacttgtgttcattgtggaaagtattttcgcaaaatataagcacctgtaattttatttaggaggagagattgacatgaaaaaatcaatttcaaagggaatcgttttgagtgctgttagttttttgggagtgtttgcaggaagtcaagttgtatctgctgacactgatgttgctattgctaaaacatcaattgttgtaaaggggtatgaatttggtccagcagtaccaaaagttgttgtaaagttagacagtaaagtctctaaagtatcaaaagaaaatgtcactgttacaacggcaggtacagaacgccaagtcagcaaggtttatttatctgataaaaatggaaaaaaagttaccaaagatagtaagtacgtcactattcaaatgccagttacttttgacaccgaatcaaattctggtgttgccagtcctttcttttacaacatggaaaatttccataatacatgggtagatgattacacggtttcaattcaagggttgacagtaactgtaaacggcgaagaaagcgagcttgacagtgagagcaacgctattaacaatcgcatttcaacagatgtagcagcatttagcaatcgtgggacttattctggaacttacacgaatccgttgaccaatcaagatgaagaactcacccttcaatatgccgcttatgaaccagaaagtttgaaaaatggaaagaaaaatcctttgattatctggctacatgggcaaggcgaaggcggtacagataccgatattacattgttgggaaatgaagttgtagcgcttgctaaggatgatatccaatcacattttacagcaggtaagcaaacgggagcctatgttttagcggttcaaaccccaacgtattggatggatgagggtgatggtacaaatggagcgggggcaggtgtgtctcgctacacagaggtactcatggatactattaaggattacgtttcgaatcattcagatgtggatacagaccgtatttatttaactggtggttcaaatggtggttacatgacgcttaatttggctatcaataatccagattattttgcagcgcttgttccgcaggcggcagcttattcttactatcaatatcagcgtaatgaggacggtacttatacaactgttcctagtgatacaagcttgtctggcacagcatttgtcaaaacagatgatatctactttgacgaggataaaattgctgcgcttaaagatattccaatttggtttatccatgccgctaatgatacggttgtcaatccaagcgattattctttaccaatctataaagctttagtggatagcggagcaacgaataaatggttctcatattatgaaagtgttgaaggttcagacatgaaagatacctcttatcttggacattggtcatggacgtatttcttcaatgataaggtgtctggtgtacaaagcgtttctgatattaaagaggctgacgacctttcaggttttttaccaaacaataaaactaatggtggaacaagcaccgtaaaagttgacggaacagcttatgataacatttttgattggttaaatgctcagaaaaaatgagtttagacaaatgaaaaaagccgtttaacacggcttttttgttaggggtgaaataggctacctagcatgatagctaaagcggcattccctttatatttttcaggactgtcagcaacttcgttgtaaagtgctgtgatttcagattctgttttgagatgatgtgttagtaaatgttgagaaatggcatgtgccagttttgcacgtgccaactggtcattttcattcttttctaactcctgcgctactgcaaaaatatctgcttttagtggctcgttatctggcaggctagcataggctttactaagtttttccattaattgatttcctttttccataaacaaaatctcctttgttgttatgctcacagtttataattttgatagaaaaaaatcaagaaaaaaaagaacgagaaataatctcgttctctttgcttttataaagaaataattacatttcgtttggtgcttcaacaccgagaagacggagcgcttcttttagaacagttgcagtagcgtagctaagtgctaggcggctatcacgttctgggctttcatcaaggatacgtgtgtgtgcatagtatttgttgaagctttgggctagattgatagcaaattttgcaacaatagaaggttcaaagttgtcagcggcacgtttgatgatacgtgggaagtcttggataagttttacaatttcccagctttcagcatcatcaagactgtaaacttggttgacagatggtgtaaactcagctttacgaagaatagattggatacgtgcgtgtgcatattgtacgtaaggtccagtttcaccttcaaatgataccatagcatcaaggtcaaagtcatagccattcaaacggtctgttttcaaatcgtagaatttgatagcaccgacgccaacagcgtgagcgactgcttccttgtcagcaaggttaggatttttagcattgatttggtcttcagcgcgtttgacagcttcggcaattgttggttcaagaaggataacattacctttacgagttgacagttttttaccttctttagtaacaagtccaaatggaacgtgagtaatatcttcattccattcaaatcccatttcgttaaggaccgcttttaattgtttgaagtgagcagattgttcgttaccaacgacgtaaatggccttggcaaagtcgtaagtacgtttgcgataaagagcggcagccaagtcacgtgtgatgtaaagtgttgcaccgtcagattttttgataagagctgggtgttcgataccatatttttcaaggttaacgacttgagcaccttgagattcttcaagaagtcctttttctgtcaagatatcgacaacttcgtccattttatcgttgtagaatgcttccccgttaaagctatcaaaagaaacaccaagttcatcgtaaagacggttgaattcaacaagactttcgtcacggaaccattgccagagtgaaatagcttcttcgtcgccagcttccaatttacggaaccattcgcgagcttcttcgtcaagttctggttgtgtttcagcttcggcattgatgcgaacgtaaagttttaagagttcgtcgattgggtgagctttgacagcctcttcgtcaccccattttttgtaggcaacaatcaacataccgaattgtttaccccagtcaccgaggtgattgattttaacagctttatagccgagtttttcaaaaatattagccaggctatcaccgataacggttgaacgaaggtgtccaattgagaatggtttagcaatgtttgggcttgacatatcgatagcaacgttgcgaccttctcctaaatcttgactagcatagtcgcttccgtttgcaataacttgacctaaaacatcagcagaaatgcttttcttgtcaaggaagaagttgatgtatggaccaacagcttcgattttttcaaagccagttgcatccattttttcggcaacatcagcagcaatcatttggggtgctttgcgaaggatttttgctaatgagaaagcaggaaaagcaaggtcacccatatcagaattttttggaatttcaagtagattaataatttgttcttggtctaattctggaacaatattttgaatgcgttcagcaattgtacgttttgtatccatgagtttctcctaaattagttagtcatattattttaacataaaaataagaaataaacgagactagctgaaagaaaacgtttgaagcagtaaaaaataagttatcataaggaaaacagcgcaaaagagagatgaaaaattttcttttttttggtataattttaaggataaatatacacaaagggaaagttatatgaataaaatagaacgtcaaaatcgaatcaaacgtttgattcaatcaggtcatattggaacacaagaagaaatcaagcgtcatttgcaagaagaagggattagtgtcactcaagcaaccttgtcacgtgaccttcgtgagattggtcttttgaaattacgtgattcatcaggtaagctttattatagtttatcagaaacatcagagacaacttttggtgctaatatccgctcatatattttgaaagttgctcgtgctgggttcatgcttgttcttcatactaatcttggtgaagcagatgttttggcaaacttgattgatagtagcgacattccagagattcttggaacggtggcaggtgcggatactttgcttgttatctgtaaagatgaagagacagctcaagcatttgaaagagacttatcaacgagcttatgagtaagtacgaccaagcagtggacaagttagttcaagctattcaaaagcacgatagtgtgcaagaatttcaaaaagtagaacaaaaaatcaaaacttttccagaacttgacagtcttgttgacgatatgaaagcttatcagcaggaggctgtgctttatcacaagattgacaagttagtggctgaagaagcagcaggaaaacaagctgaccagctacaaaaagacttatcggatctcccgattgtcaaagattatcgtaacaagatgcaagatgctagtgatttggttcaatacatcacgaaaaacttggaaacgaaaattaacgaggagttaactaataatgacaaaagataaaatttctccaggcatgcaacagtatttggacgtaaaaaaagattatccagatgcttttttacttttccgcatgggagacttttatgaattattttatgatgatgcggttaaagctgcacagattttagagattagtttaactagtcgtaataaaaatgctgacaatccaattccaatggcaggtgtgccttatcattctgcgcaacaatacattgatgtattagtggaaatgggttacaaggtggcaattgctgagcaaatggaagacccaaaacaagccgtcggtgtggttaaacgtgaagtcgttcaagtgattacgccaggaacagctgtcgattcctctaaaccagataatgctaacaatttcttggtggctatcgattctgacggcaaaacgtttgggctagcctatatggacgtgtcaacaggtgaatttttctcaacaagtctttctgattttacaagccttagaagtgaaattctgaaccttaaagcgcgtgaaatcgttgttggttatgagctttctgaaacagagcaacatagcttagtcaaacaattaaatttactcttatcgtttgaacaagaacgttatgaagatgtgcatttaatcgacccagatttaacggccttagaaatttcagcagctgagaaattgctacaatacgttcatacaacgcaaaaacgtgagctaagtcatttgcaaaaattggttcattatgaaatcaaagattacttgcaaatgtcttacacgacaaaatctagtctggatttattagaaaatgctcgaacaagtaaaaaacatggtagcctttattggttactagatgaaactaaaacggctatgggaatgcgtctattgcgcaattggattgaccgtcctttggtgaaccaagcacagattgaagagcgtcaaaatattgttcaagttttcctagataatttctttgagcgtagtgatttgacggatagtctcaaaggtgtttatgatattgaacgtttagcgagtcgtgtgtcatttggaaaagctaatccaaaagatttattacaactcggtcatactttggcacaagtgccaacgattaaggcgattttagaatcgtttgagagccctcaccttgacaagcttgtcaacagcattgacactttgccagagctagaatcgctgattcgctcagctattgacccagatgcccctgctgttatcacagaaggtagcattatccgtacaggctttgatgagactttggacaaataccgtaaggttatgcgcgaggggactagctggattgcagaaattgaagctaaggaacgtgctgcaagtgggattaccaatctaaaaattgattataataaaaaagacggatactatttccatgtgacaaattccaatctctctctagtgccagattatttcttccgcaaggcaacgttgaaaaattcagagcgtttcggaacggcagaattggcaaaaattgaaggtgagatgttggaggcgcgtgagcaatcagcaagcttagaatatgatattttcatgcgcgttcgcggacaagttgagcgttacattacacgtttgcaagacttggctaaggcgatttcaaccgttgacgttttacaaagtttagccgttgttgcagaaaataaccattatgttcgtccaacattcaacgatagccatgagattaaaattgaaaaaggtcgtcatgcggtcgttgaaaaagtcatgggaacacaagaatatattcctaatacgattacgtttgctgccgatatcaacattcagctgattactggtccaaatatgagtggtaaatcaacttatatgcgtcaacttgccttgacagttattatggctcaaatggggtcttacgtagctgctgaaagtgtcaatttaccagtatttgatgcgattttcacgcgtattggtgcggcagatgatttgatttcaggacagtcaacgtttatggtggaaatgatggaagctaaccaagctatcaaacgtgcaagttctcaatccttgattctttttgatgagctaggtcgtggtacagcaacctatgacggtatggctttggcgcaatcaatcattgaatatatccatgatcatatcggtgcaaagaccatgtttgcaacccattatcatgagttgacagctttgtcaacaagcttgacacatcttgtcaatgtgcacgttgctacccttgagaaaaatggtgatgtgacttttcttcataaaattgcagaaggtccagcagacaaatcttacggaattcatgttgcaaaaattgctggtttaccagaagaattattacaacgtgcggacagtatcttgacgaatttagaatcaggtgctgcgcagcttcaattgacccctgaggtagaagctgggccaattactgtaaaatccgaagtagcagaaccagtggcagagcaactaagtttatttgctgatgactcatctaaccaagaagtgattgaagcactcaaaaaagttgacttgatgaatttaacaccaatgcaagccatgaatgttatttatgaattaaaaaatatgttgtaacaataagaggcagtcttaaagaagattgcctttttagtttgtgttataatagaagataaacaagcaagaatgaaaggaataaggctgcctttaaaaggcttgctaatagataaatcatgagtaaaattattgagttgccagaggttttggctaaccaaattgcggcgggtgaagttattgaacgaccagctagcgttgtcaaagaattggtggaaaattcgattgatgcagggagcagccaaatcaccattgaaattgaagaagctggtttaaagaaaattcaagtgacagataatggcgaaggaattgctcaagatgatgttgcattaagtttgcaccgccatgccacaagtaaaattaaaaatcaagctgaccttttccgtattaggacattaggttttcgtggtgaagcgataccgtcaattgcctccattagtcattttacagtcaaaacagcaacggcagatgaaaattatggaacattgctagtagccaaaggtggtgaaatcgaaaaacaagaaccgatttctacacccgttggaaccaaaattacggttgaaaatctcttttataatacgccagcacgtcttaaatacatgaaaagtctccaatccgaattagctcatattgttgatgtggtgaatcgtttgagcttggcgcacccagaggtggcttttagcttgattaatgatggtcgtcaaatgacaacaacatctggtactggtgatttgcgacaagcaattgctggtatttatgggcttaatacggctaaaaaaatgattgagatttcgaatgctgacctcgattttgaagtgtctggttacattagtctgccagaattgacacgagcgaaccgaaactatattacgattttgattaacggtcgttatattaaaaactttttgctcaatcgtgcgattttggacggttatggttcaaaattgatggtgggacgttttccgattgctgttatcgacattcaaatcgacccttatttagctgatgtcaatgttcacccgacgaagcaagaagttcgtatttcaaaggaaaaagaactgatgagcttaatcagctctgctattgcagagagtttgcgtgagcaagatttgatacctgatgctctagaaaatctggcgaaatcaagcacacgtgggcttccgaaaccagagcaaacgagcctgccgttgaaacaaacagacctttattatgataaagaacgtcgagatttctttgtcaagtcagatacggttgaagagcaaccagtacagttattcaatgaggttgacaactctgtcaaggaagttgacaagcaacaaacatcagtgaaatatgcgcagcgttccgaagtagatagtcaagatgatgaacatgataatcttgattttaaaaacaagacaaaaatcaataagatgattgaaagtcttgataatgaggagtcatcaactttcccagaattagattattttggacaaatgcacggaacgtatctttttgcacagggaaatggtgggctttatatcattgaccaacacgctgctcaagaacgtgttaaatatgaatattatcgtgagaaaatcggcgacgttgacagctctttacagcagcttctcatgccatacctttttgagttttctggagctgattttattaagttgcaagaaaaaatggagctgttaaatcaagttggtatttatctagaaccatatggaaacaacacttttattctccgtgaacacccaatttggatgaaagaagaggaaattgagacggctgtttatgagatgtgtgatatgctgttgttgacaaatgaagtatcggtgaagaaatatcgtgcagaattggcaattatgatgtcatgcaaacgctcaatcaaagcgaatcacattcttgatgattattccgcccgacatcttttggttcagttatcacaatgtaagaatccttataattgtccacatggacgtccagttcttgtcaactttaccaaagctgacatggaaaaaatgttccgccgtattcaagaaaatcacacaagtttaagagagttaggaaaatactaagatgtacgattatatcaaaggaaaattaactaaaattaccgccaaatacattgttgtcgaggctggagggctgggctatattgtcaacgttgctaacccatacagtttttcagaccttgtcaaccaagaggttcagatttatttacaccaagtcattcgtgaagatgcgcaattgttatttggttttcacacagaagatgaaaaagctgtttttcttaacttgatttcagtttctgggattggtccgacaactgcgctagcgattattgcggttgatgataatgaagggcttgtcaatgcgattgacactagtgatatcaagtatttgatgaaatttccaaaaattgggaaaaagacagctcaacaaatggtcttggatttagcaggaaaatttgtcgatgtttcggtggaaaatggcaaagcttctcagacaaaaacagctacaaacgagcagcttgaggaagctatggaagctcttttggcacttggctataaagctgcagagctcaagaaaattcgtaagttctttgaaggaacaaatgaaacagcagaacaatacatcaaatcaagccttaaaatgttgatgaaagcttaatttaaagcttttttggctattgtttcacatgaaacactcctcaacttctcagttggggagtgcttttatatgcttaaatttacctgtgctttgctacttctttttcaagtgcttcaaaaatcttttcttcttcggttaagtgcagtagagacattcctttatcaattaagctattatcatcacgacaaatgccaaggcggacttgcgcaattcctaaaaagtcatagcgttttaattccttagcaagtttgagggcttctagagaaaatgtttcacattctttggtttgatgattgtccagatagatgcttgcgagattggttaacaaggtcaattgcaacggcttgatgttgtaaaggtcggtgtatttgactaagttagttaaaattttgggagtgattgttttcagagtctctagtggaaaatggtaaagaattgttaatagtaatttgaaatcattctgataccaagtgttttgtttttcaagataatgccaaattttctgagttgtttcttgaaaggtagtatcttttgattccccaccaaattctcttacgtggatagtaacagttagtctgtcaagaagttgttgaatcggtatgtcatggtgtgtttgaagatattcttgacattgttgtttgagagataagagttcggtgttgtcggtaattgatagattgttattagcgatatttaataatttttgacgttcacttggctgatagacgttgcaaatgtattcaaattcttccaagctcatgttgatttgctggagaagaaaaatgaaagtatcaaatttagggataacttgaccgctttcgatacgagctagagtagagcgggcgagcatgtcaccacaaatttcttcctgtgttaacccctttgattgccgaatatccttataaacttttccaaaatcccaacgcatatcctaatctcctaaaaaatttgtgttactaaacgctacaaaatgttatgttgacgtgtttttattgtatcatataagtatatatttaaatgaataaaacctcatgatgtggtgtatagtcaagattaaatttagcatagatgtgaaaggagaactattaggatgaaaaagtattttccatttgtgattataattgcatatattatcagtctctttttgccgtatgcgtctggtatttcagttgaaacatatcagttaacgactatttcagggatttcatttttgaaaaatcattggcttgttgctagtattttgattgttttgctactgatttatcaatggggtggcaagcaatcgttagtggctggcaatattctccttgttttaattggggtaattttgctgtatctttatctgattccgtttatcggtgcttttggcgaaagttttatggtaggaattcgactcatcagagatacactagcgactagcttaatgattggttattatttatctgctctatttgcttttgtgggctatttttggctcattaaaacacgccgtaaataatgtcgctaaacactacaaaatgttattttactttattttcggtgtatgatagactaaaggagattttatatggtgaaaaagaatgttattatatcactttcagctcttgttttattaggggcatatggtgctagcttgacaacaaggcaaacttcggttcaaccaactaaggttgtgacagctgatactaaagatacagtcgtggaacaacactcatcagttgatgacgaggtggcacagattagtaatacaactattcgagaatttgttcaatactttagagccactggtgacaacccagatgagttttgtctgtttgaggatttgtctgatgacaaacgtatcgttgtcattgatgatggaacaacgcccgcagataaagcaccagtaattggctattcggctgatgatgcagaatcaacagtcgttggtagtttgacaactgaagagggtacgattacctttgataccagtgacccgagccaatctgcaacaatcgctgaaatcaaagcagccgctgcacaatatcaataaaaggaaagctgaccattggtgatttggtcagcttttataggtgaaatggatgaaaaaagaagaaaactatgtcaaatatttttttatactactaattctccttgctttaatcatttttggtgttttaaccatgaagtctggtcgattgctatttctttttgaggggatagggttaagcctaggtgtcagtgttacttggctctattggaagaagaagcattgatgaggtttacatggttgtcaattaggtgtaaatgtggtgctaactgccaaaaagattgtttttctggtttagtttaaagtttcaaataaatcttgacatcatcgggaaataagagtatcctgtaaagaaaaattgatatgatgagggtaggtgggagttatgaaaagtattactaggaacacttttgtttaccttttggcaaattttttagttacggtggcttattccatgccgcactcgattttaacggttattttattgtcaaaggggttgagtttgtcgcagattttgattgttcaatcagcttatagtattgcaattgttctgtttgaatttccaagcgggttgattgcagacaattattcccgcaaaaacatttatagtctatcaaagttatttttgatagtgatgtttttgattgtcctttttagtaacaatttttaccttatctttgctgcttggttttgctatgggattgcttcggctttggatagtggaacgcttgatgcctacattatcaatcaattaaaaatagctcatcgtgaggacgaccttcgaaaatttctagcgctcaatgatcgtttggaaattgtcgggcttttattgggaagtagtctaggtggtgttctctatctaagcattggtatcaatatttatgttttaggtattgcttttttagtggcttcaactcttgtgacgtttttctttttcaatgaaaatctaaaaaatacgacactagaagatagccatgtttctgttttaaaacagcagattacagatagttttatcgagttaagaaagcaaccacgattgggtgttattctgatttttgatttcttgacacaaattttttttcaaacccatttccagctgtggcaatcgttttttctgagtaaaggtgtagataccaaatattttccagccttttacatcgcttttcaagtcatcacgctgttttcatattctatcaatattgatggaattaaaaaatatgcagggcttattaagttttgtccgttgattatttttcttcctttgaccttcctttcaaaacatctttgggtgttattgccagcttattttattttcatctttgttttttatgtcattgaatttattttaaattattatttcaacaaaatggtgtcaattgacaatatctcgtctcttgtttcctttaaatcgaccattagtcgcttgggaagtatttgtttattgtgccttttgagcttaatggtaaaagtatttgatgttgaaaaagtcatggcagtcaactttatggcatcattacttttcttgtttttactagtcattatatggttaagaaaacagcctaggttgacaaagtagtaaagcaagttgacagtggattaaactaatattttctcattaaaatctgactttatagcaaaaagcagcaaatttgttgctttttttgatagaataaaactaaattacgaatagataagtaggtggcaattatgaaagctgaaatcattgctgtgggaacagaaattctaacaggacaaatcacaaatacaaatgctcaatttttatcggaagaatttgccaagttaggaattgatgtgttctttcaaacagctgttggtgataatgaagaacgtcttttatcagttattgatttagcaagcaagcgaagtgaattagttgtcttatgtggagggcttggtccgacagaagacgatttaacaaaacaaacgttagcaaaatatttgggacgcgatttagtctttgatgaacaagctaacaagcgtttggacgaattttttgcgacacgtccgcagtttgctagaacggctaataacgaacgtcaagcacagctgattgaagggtcaataccgttgcaaaatagcactggtttggctgttggtggcgtgctagaagtaaatggcgtgacctacgttgttctacctggaccaccgagtgaattaaaaccaatggtattggattctctagtacctttattgtctggagaccataagcagctttattcacgtgtgttgcgtttctttgggattggtgaaagccagttagtgaccgttttgacagatttgattgataatcaaacagacccaacaattgctccgtatgcgaaaacaggtgaggtgacccttcgtttatcaaccaaggcagatgatgtggcgtcagcaaaagcgaaattggatgctctagagcataaaattctagccaaaaaaacattaaatagtattcctcttgaacagttactttatggctatggtgatgataacagtatggcgcgtgttgtttttgatttgttgaaagaaaagtacaaaaccattacagcggcagaaagtttgaccgcagggctattccaatctagtatcgctgatttttcagggtcatctgcagtatttaatggcggatttgtgacgtatagtatagaagaaaaatcaaaaatgcttcacattcctcttgaagatttgcaagaacatggtgtggtaagtcactttacagctgaaaaaatggcagagcaatcacgtttattgacaaatgctgattttggtatcggtttgacaggtgttgcaggaccagatagcttagaaggacacccagcaggaacagttttcattggtattgctactagagaaaaagttcattctattcgtgttgttataggtggacgaagccgttcagacgtccgttatattgctactttatatgctttcaacttagtacgtcaagctttattacaaggctaaaatttggtataatagagttagtatctcgaacaaacagaaagggaaaaatttggctaaaaagacaaagaaaacagaagctatcactaaaaaatttggtgatgagcgtaaaaaggcacttgatgatgccttgaaattaattgaaaaagatttcggtaagggagctgttatgcgccttggtgaacgtgctgaacaaaaagttcaagtcatgagttcaggtagcttggctcttgatattgctttgggtgcaggtggttaccctaaagggcgtatcattgaaatctatggacctgaaagttctggtaagacaactgttgcgcttcatgcagtagcacaagctcaaaaagaaggtggaattgctgcctttattgatgccgaacacgcacttgacccagcttatgctgcggctcttggtgttaacattgatgaacttctcttgtcacaacctgactctggggaacaaggtcttgaaattgcaggaaaattgattgactcaggtgctgttgacctcgtcgttgtcgattctgttgctgcccttgtacctcgtgccgaaatcgatggtgacattggtgataatcacgttggtttgcaagctcgtatgatgagtcaagcaatgcgtaaattgtcagcttcaatcaacaaaacaaaaacaattgcgattttcatcaaccaattgcgtgaaaaagttggtgtgatgtttggtaacccagaaacaacacctggtggacgcgcacttaaattctatgcgtcagttcgtcttgatgtccgtggtaacacacaaatcaaaggttctggtgaccaaaaagatagcaatattggtaaagaaactaaaatcaaagtggttaaaaacaaagttgcgccaccatttaaaacagccgaagttgaaattatgtatggtgaaggaatttcacgtacgggtgagcttgttaagattgctagcgacctagacatcatcaaaaaagcaggtgcttggttctcgtataacggtgagaaaatcggacaaggttctgaaaatgcgaagaaatacttggcagaacacccagaagtctttgatgaaatcgaccacaaagtacgtgttcactacggtcttgtagaagaaaccgaagatgagaaagcagcagatgttgttgaagaatcagtagcaactaatgataatgttgacgaagttgttcttgatttagatgatgctatcgaaatcgaagaataattcataataacgttgaaactctgggacaattgtctcggggttttcttgtgtaagaatgttaatctaagttgaaaatatttgagctgattttcgattttttcagaaataaatgtagcgttttcaaaattacaaatgatttttttagatttttattgaaaaaaataatctttttaattgactttttgaaaaaataggtcttaggtcctatgttttcgttaaggttggtgtgctataatacaactatcatgggatagaaagtgagagtgcacatgattaaaatttacacaatttcaagttgtacaagctgtaagaaagccaagacatggctaaacgctcatcagctcccttataaagaacagaatttaggaaaagaaccactaacacgagaagaaatcttagcgatattaactaaaacagaaaacgggattgaaagtatcgtttcatctaaaaaccgttacgcaaaagcacttgattgcgatattgaggatttaagtctgagcgaggttattgaccttattcaagaaaatccgcgtattttgaagagcccaattttgattgacgataaacgccttcaagtagggtacaaagaagatgatattcgtgctttcttgccacgttccattcgtaatgtggaaaatgcagaagctcgccttcgtgcagcgctgtaatagatagtctaaaagctccgttttggagcttttttaatattttccttagcgtggattgttagaaccaaagaatttttaaaggttatagtagttgattgcgcgtggaaaaaacgagtgcttgctcttttttatttttataaagatagtaaaaagtttggtgatagttgaggcatggggagcaaaggttgcttaatgggacaattgaaacgaaggatttgaaaatgaaaataaactttggtgaaataaagtcagattcttgtgaaatctttgtgaataagctataataaatggtgacagctattttagaaagaaggtgtaagtatgggatttacagatgaaactgtacgctttaatttagacgatagcaacaagaaagaaattagtgaaaccttaacaactgtgtatcgttctctcgatgaaaaagggtataatccaatcaatcagattgttggttatgtcttaagtggggaccctgcttatgttcctcgttacaatgatgccagaaatcaaattcgtaaatacgaacgagatgaaattgttgaagagcttgtccgctactatctcaaaggaaatggaattgacttgaaatgagaatcatgggactagacgttggctcaaagacagttggcgttgctatcagtgacccgctaggctttacagcacagggcgtagaaattatcagaattgatgaagaagctggcgaatttggttttgaacgacttgaagagttagttaaacagtataaggttgacaagtttgttgttggtttgcctaaaaatatgaataatacagaaggtcctcgcgtggaagccagtaaggcatacggcgataaaatcaacgaacttttcaatattcctgttgattatcaagatgaacgtttgacaactgttcaagcagagcgaatgttggttgaacaagctgatgttagccgtggaaaacgtaagaaagttattgataaattggctgcgcagcttattttgcaaaattatttagatagaatgttttaatctaatcattaattcattaaaggagaaactttatggcacataaccataatcacgatcataatcatgatcacgaacatgaagttattacacttgtagatgaacaaggtaatgaaacactttttgaaattcttttgactattgatggtcgtgaagaatttggtaaaaactacgttctcttggtaccagcgggtgctgaagaagatgaacaaggacaaattgaaattcaagcttactcatttactgaaaatgaagatggaactgaaggagaccttcaaccaattcctgaagattcagatgctgagtgggatatgattgaagaagttttcaatagctttttagatgaggactaatattgtcttgatatgttgaagggaagtataggttgtgcctatgctttttttcatgctcttttacgaataactaagtaaaggaggtgtgaatcatgacaaagaacgcgtgtttgagccaagaagaaagaagcttcttgaagcgctataaaaccaagccttatcaccgttttagggaaattttagtttactgtgctatactccctaaattgactaatgattagtttctgttatacttaaagtatgacaattcaaggagagaataagtgaatacatcagaacaagtaaatgtagatcagagtactgcacaatcttacagccgttcaagtcgttcagctcgtaaggttagtgagaacaaaagtcaccaagaggcgtctagaagaacaaaagtcccacaacctcataaactttaccttttaatattgagtgttgttgttagttgtttgtctgtatcaatgccagtctttacagatatggcaaatagtgtgcaatctcaaaacctttacattggtttaatgtttactaaaggacaacttccgtttacagatatgtttgcgacaggtggtttcctttattatgctttgattgctttggcttactatcttggttctacgttgtggttggtgccaattcaaattgcaacgttctacttgtcaggaatctatttctataaattggttaattactttactagcagccaacgtgtagcagttgcttttagtggtattttttacctattaaacattgctcttggttttggtggtctgtaccctatccaatttgcgatgccatttgtcatggtatctttgtggttcctaacaaaatattttgcggatattatcaaagacgaagcctttatcctttatggatttgctggcgcagcagcaatgcttttagagccacgtactttggtgttctggggactttctttcctaaccattatcgtttataatttaacacaaaaacatttcgctcgaggattttatcaattattgtgtatcattttcgggacaattcttgtcttttacacagttggttactttatcctgaatttgcaggtgttatcatcctatatttctcaagcaattgtttatcaatttacgtattttgcgacaagtgatagtaattttatcttgacattgctattccaagttgttgtggctctagtttcagggattttacttggtgctcttacttttggaaaaatcatcaagggagctagtgacaaggtatctaaatggcttatcttccttgttttcttaggattcttagttattgaccttttgtcacaaagttatcatttctatcatttgttaacagtattgccttttggtttgttgttaaccgcaatggcattgggtgaacgttatcaacgcagcttgacgaaaacatcacatcgtcgtaagaaatcatctagtgatgacaaaggcatttttggattatatctaagtcgtcatctttatttgccgattttgttgcttattatcggtgtaggacaacctgtggtttcttatttcttgtcatctggtactgatagtgaacgctcgactattgcaagctatttgaaaaaacaaacatctagtgatgatacgatttacgtctgggatacgtcatctaagattggtattaagagtcaattagcaagtagttcacaatttacatcacctgttgtgaatacaactaaaacatctaatgaaaaaacattagaagatgaattattacaaaatctagcgtcgtatattgttgttaatagtgatgaaaaaatttctgatacgataaaaaatgatatttcttcaaactatgaagaggtctcaatcagcggtgtatcaggctttaccgtctatcataaaaaatagagactaaacgcaatatcttgtggtctaataaaaaaatgaccacaagatattgatttttttttcttacgtgttataatagacgagtaagaaggagtgttcatatgattacattagaaaaagaaacaattgcgactcaaccagctgtcaaagttatcaaacgtgatggacgttctgtgaactttgatgcagataaaatttataacgctttggttaaagcaagtaataatgtgacaaaaatgtcaccagttgttgaagcaaaattggaagctatttcagataacatcattgctgaaatctttgatcgcttcaaagataatgtcaaaatttatgaaattcaaaatatcgttgagcatgagcttttagaagcaaatgaatatgcgattgcacaagaatatattaattatcgtacaaaacgtgattttgcgcgctctcaagcgacagacatcaactttacgattgataaactattgaacaaagaccaaactgtcgtcaatgaaaacgctaacaaggatagtgaagttttcaatacacaacgtgacttgactgcaggtattgttggtaaatcaattggtcttaaaatgttgccagctcatgttgccaatgctcaccaaaaaggtgatattcattatcatgaccttgattacagcccatacactccaatgacaaactgctgtttgattgatttcaagggtatgcttgcaaatggcttcaagattggtaatgctgaggtagaaagtccaaaatctatccaaactgcaacagcgcaaatttcacaaatcattgcgaacgttgcgtcaagccaatatggtggttgtacagctgaccgtatcgatgaatttttggcaccatatgctgaacttaactataaaaaacaccttaaagatgctcaagattgggtagcagaagaccgtcgtgaagattatgctcgtacaaaaacgaaaaaagacatttatgatgctatgcaaagtcttgaatacgaaatcaatacgttgtttacatcaaacggacaaacaccatttacttctcttggatttggtctaggaacgaactggtttgaacgtgaaattcaaaaagcgattcttgaaatccgcattaaaggtcttggtagcgaacaccgcacagctattttccctaaacttatcttcactttgaagagtggtcttaaccttgaagtgggaacaccaaactatgacattaaacaattagctttggaatgtgcgacaaaacgtatgtatccagacgttctttcatacgataaaatcgttgaattgacaggttcatttaaagcaccaatgggatgccgttcatttttacaaggttggaaagatgaaaatggtgttgaagttaactcaggtcgtatgaaccttggtgttgtgactgtaaaccttccacgtattgctatggaatcaaatggcgacatcaataaattctgggaaatcttcaacgaacgtatgggcattgctaaagatgcacttgtttaccgtgtagaacgtgtcaaagaagcgacaccagcaaatgcgccaattctttaccaatacggtgcttttggtaaacgtctcggcagatatgataatgttgatgaacttttccgtcatcgccgtgcaacggtttcacttggttatatcggactctacgaagttggtacagtcttttatggtccagaatgggaaacaaacccagaagccaaagaattcacagttgatatcattcgtaagatgaaaaaattgtgtacagaatggtcagatgaatttgattatcatttctcaatctattcaacaccgtctgaaagcttgacagaccgcttctgccgtcttgacacagaaaaattcggtatcgttaaagacattacagataaagaatactatacaaactcattccactatgatgttcgtaaggatccaacaccatttgaaaaattagactttgaaaaagcttatccagaagctggtgcaacaggtggctttatccattactgtgaatacccagttcttcaacaaaatccaaaagctctagaagctgtttgggattatgcttacagccgtgttggttaccttggaacaaatacgccaattgaccgttgctatagctgtggatttgaaggtgactttacaccaactgaacgtggttttgtttgtccaaactgtggtaacagcgaccctaaaacagtagatgttgttaaacgtacttgtggttatcttggaaacccacaagctcgtccaatggtaaatggtcgtcacaaagaaatttctgctcgtgtaaaacacatgaacggttcaacaattaaaaatcccggtgattacagcaaacataaagcttaaaatgggaaaataacagggctttcagttcttgacaaagtcaccaacctgtcagtttgggagtttttcctgcttattttaaacgagtcattttccttgtttgagactttctatcacttatatcaaatatggaaaacgcgttaataaatatggtttagacagtttcaggacatattgaagctggagacatttgtcccagcttctttattgtattaatagatagtttaatgaaaggaaagcatatgggaaaatatcagttagattataaggggatgcaacaagttgaacgttttcacgaaaaacattcaaatgtgaaaactgacaaaaaagcgcgtgttagtcagttgaaagcgcagtttttagaaaaagctaaaaagaaaagcaaatagaggtaccgtttatgcaattacgaagacctgaattatcagataaagcagctgttattgacatgatgaaagaatttgaggcaagtcaatctgctcatgacggcggtttttggtctgtggataactttgtttatgaggactggattgaaagaaatcaattaagtgaaatgggtattgatgtgccgtcaatgtttgttccagcgattcaatttgtttcctttgatgataacggaagggctctaggatttttgcatttacgtttacgtctaaatgataatctcttaaataaggggggacatattgggtattcgattcgtccgtcagagcgtcataagggattggctaaggaacagcttcgtctaggtttactagaagctaaaaagaaaaatatcaagcaagctttggtgacttgtcacacggataacattgctagccgaaaggtgattttggcaaatggtggtgttttagaggatgtccgtgagtcaaccgagcgttattggataaatttggatgaagaataacctgtggataagtggaaattaaaaatagaaagagggctaggatggaagaaaaaaattggaatactcccgagcctggtgaatggaagtcagaggaattaagtcaaggacgaatcattgactacaaagcttttaactttgttgacggtgagggtgtgcgtaattctctttatgtttctgggtgtatgtttcactgtaaaggctgctacaatgcggcaacgtggtctttcaaggctggtatgccttatacacaagagcttgaagagcaaatcatggctgatttggcacaaccttatgttcaagggctaacgcttcttggtggtgaaccatttcttaatacggggattctgttgccattaatcaagcgcgtgcgccgtgaattgcctgaaaaggatatttggtcttggacaggttatacgtgggaagaaatgatgcaagaaacgccagataagttagaaatgcttagtttaatcgatattttggttgacgggcgttttgatattactaagaagaatttaatgttgcaattccgtggctcttctaatcaacgtatcattgatgtgcaaaagtcgttgaaagctggtgaggttgtcatctgggataaattaaatgacggtgaccaaaaatttgaacaagtcagccgtgatgatttgatttaaggaaaaatatttttttgatactttctttaggttcctcgcttttttatttctaggctcagacctcaaaccttccactggatgctttgagccgacggcaggttcaatagtccagtggactattaaaggaacccaaggaattcttaaaacttccgagatgtaggagaaacttcgtttctcttatctgcaaccttaaacaatctcccagattgtttaagcggcacaaagtatcgttttggtgttcgtttcgctcgcaataatattctgttaatatagcaattaataatatttagaggctattttagataaaaactgacttgtttataaattaaaaattggagaaaaattcattcttcaattttttcattttggtggaatttctgtttagtttaagttgatgacaattttttattaataaaattgctggttatcattgctattagaggaatttcctagctaaacaattcactgtaggtcttggttttggtataatagggatatgagcagaattttagataatgatattatgggtgatgaggaatttgcggagcgcacgcttcgtcctcagtttttaaaagaatatatcggacaagataaggttaaaaatcagctaaaaatctttattgaggcagcaaaattacgtgatgagtccttggaccatgtgctattgtttggacctcctggtcttggtaaaacgacaatggcatttgtgattgctaatgaattaggggtgaatttaaaacagacatctggacctgctatcgaaaaagctggtgatttggttgctatcttgaatgatttggaacctggtgatgtgctttttattgacgaaattcatcgtatgccaatggctgtggaagaagtgctttatagtgccatggaagatttttatattgacatcatgattggcaatggtgagactagtcgtagtgttcacttggatttaccaccgtttaccttgattggtgcgacaacacgtgctggtatgctttctaatcctttacgtgctcgttttggcattactgggcatatggaatactatgacgttgaagatttgacagaaattgttgaacgtacggcagatatttttgaaatggaaattgtccatgaagctgcccaagaattggcacgacgtagtcgtggaacacctcgtattgctaatcgtctcttaaaacgtgtacgtgattacgcccaaattatgggagatggtattatcacaaaagatattaccgataaagcattgacgatgttagatgttgaccatgaggggcttgattacattgaccagaaaatcttgcgtaccatgattgaggtttataacggtggtcctgtcggtttaggaacgctatccgttaatatcgctgaagagcgtgatactgttgaggatatgtatgagccgtatttgattcaaaaaggctttattatgcgcactcgtactggtcgtgtggcaactgaaaaagcttatgaacatttgggctatccttattcggaaaaataattttttagcttaaggtaagtttaagcaagcctttatatactataaacaatcctaaaacttttctttttcataatctcctgaaagaactccgctagtggggttctttctttttcgttttgaaccgcaaaataagtagaaaaatagtaaatttaagccataggtagcggaaaatagcacagaaaatagtaaattcttgagcaatttctcccagattgtggaagtttagttaaaaataatagaagctgtggaaaagtacacaacttctttttttactgaaaatgatagaaatcccttgaaatcaaggtttttagtaagttttgtgctaatttcttcttgtgaaaaatgagttataaacaaggtgtttttaaattctgtggattagtgctaaagcttgatattataggattcttggcgtgtttatacacaagttatccccagtatataaccatacttatccacaagttgtgaataagtgttgatatctgtgtaaaaaagttggtgattttcggttttttttacgcatttgcagaatactttgacttgtccacagaaaatttcatgaataaaagcctagcacggataataaaccgcatcccaattgttagattcttgccgaactcttggggttaggttcgttgtctatgctaggctttttggtgctacgataacatgtagttataaacttgcgagaacataaaaagtgactaatgtgtgccttgcaacacattgttacctaagggcgattatagtgagaaacgatgtcaaaaattgtaaagcttgttaaacaactgtcaataccaatgtaaaccttaaaggtgtaaaaagctaattattggtaataagattgttaattcgtttgacaatactgtcaactataggtttacaatatgttaataaatgagaaaaactgtcttttctcataaatagtgaaaaatctggtaaaaaaaaacacctttaatttccattaacttagttatctttgttagagttttgtgaaacgttgtcaaagtaacctgggatggaactaaaaagcagtgcaagattcttggcgatatgttctggtctttcgggttcatctttggttaaccaaaattgtagaacattgagataagctccgaataaaccttttgagatgtaatcaatattatgatctgcggtgtcctcaacacaccaagggagatttatcgttttatatattagttcagatttatcattaaattttgcagttaaaagcgagaaatgtccactttcgacaagtgagcggataaattcacgattatagtacatgaaatttaatgtgacgaggaaaacgtcctctgcctgttgtgctaatataaaattgtcacgttggaggtaatacccctcaataaagttatctaaacaatagtccattaagtcagacttgctattgaaatatcggtaaaaggttcgccgcgagacgccagctttttccaaaatgtgatagatagtgattttgtcgtaatgccgttcagtaactagtagataaagtgctttagataagcgatgtttggtttccaaaatttgatgctgtttttttgataaatgtggcataaaataacccctctacttgaataatgtaatatttctgaaaagacaaaaaattatatccaatcaagttagcattgtatcatattctgaaagattaagccatatcattttgtgagcaagtgttgagataatgacaaatgcaatcttatattagtgaaaattaaatattaagaattaagaaaattataaacgatgatacattttcttaaaaaatgtatcacttgtataaaaagtcttttcaaattcactaaaaaatattataatttatcttaaaaaaacgtaatatgggcaatagcgcgttatttttaattagcgctattgctaatttacaaaacatcagattagtgataacaatatcgaaaattaaaaaaaaaaaaaacagattagaaagaggtggcgccgtgcttgatccaaaacagttaagaaagcttaaacgttcagacttatttgaactgttagttgagcaagcaaaagaaatcgaagagcttcaagagcgtgttaacgaactagaaggcaagctgcagcgtcgcgagattaatctttctgaggcaggttcgattgctgaagctgcgttggctatcagtaaagttttcgatgaagctcaagcggctgcgaatgtttaccttaataatgtaaagcgtcttgcgggtgcaagcgaagaagatagtgaaaaatcgtaagaggatacttttgggatgaagcatttatttcagaaaaaatcgcagaaagtagaattagctgatttaccaaaagcagatgcgctttcggaagagttaggaaaaatgaaataccgcgagcgttatatgcgaacattacgaggaacaatctttacgttgcttacagtagcagctgttgctgtactcgtggcgacaatctggttgccagttttacaaatctatggaaattcaatgactcctaacctagaagctggagatatggtagtttctgttagtagtaaaaatttaaaacagggtgatgtcgttgcattttattacaataataaagttttggtgaaacgtgtgattgcgacatctggtcaatgggtcaatattgacgaggacggaaatgtctatgttgatggcgaaaagattgatgagccatatcttgtagatggtgagaaagcttatggtgaaaccaatattgatttgccttatcaagttccagatggaaaattcttcgtcatgggagatcaccgaagtgtctcaattgattcgcgtaacaccgctgttggtactgtgagtgaggaacagttagttggcaagctaacgtttagaatttggccgctcacacgaattggaacgattgaataaatggaaaaagatttatttagaaaggagtcggatgaagaagctagggattaagctagcaaatctgataaaaaagagggtacaagatagtattattgcaaaaattgctttagtattatcggttgctattgttttttgcacaacctatcttttaattttgccagcgctaacaattagtacagatagcagttcttctgttattcagtcagtaagtagttcggaagaaacaactactgaagctttgcaagaagaaagcagtcaagcagaaagttcagaagcatcagatagtagcacaacgacatcagaagcagagacagaaacgtcagattctgtcgttccaggaagtttaagtgctgaaacatcagatgttacggtgacggtaacgtatgaggatgatacgttttcagaacctgttacgttaaaagtcagcccagtatcagatacgagcgctattaatgacaagctgacatctgttttgagcgaaacaaagcaaactttggcacaagcttacacatatgatatttcgtttgtcacagcaagtggtgaagaagttgaaccaagtaaggatgtcaatgtctcaatcgcctttaagaatgccgtttcaagttctgaacttggaggtaactggaaactttatcactttgtggacaatgatgtcaataaggtggaggacctcacaggacagactgatacaacgattaaccaagatagttcagaaaatgtcacaagcgttgattttaagtcagatagtttttcaaactatactgtcgcagatgtcacctatgctgacttttcagattacttgacgggatacagctatgacgaaagctctgttcaagaagacttgtcaacggaagaattgacgatttcattaaagttatcatttaagattaaccaaaccgatttgacgagtgaaaaaaattattatctcgcattgccagatgatacctcaattggtgccgacattacactcggaacagaatacactggtcgtgatggtaatggtacggaagcttataaatataaattttactatgatgagtcaactggtaaatattatatcttggtttcgtttgacgattcttacgtgtcatcaatgggaagtggggttgagtctacagggtatattaattatgaagcaatctttggtttagagcataagaccagtgatggtgggtatactgttgtttattcagatgatgttaaagttgaaattccagcgagtgatattacaaagaattacgacttaaccacatcaaaaactggtacagtttcatacgacggagatacaccgtatattacttataccattacggtagattctaagtatggaacacctggagatattgatttaacagatactttaacagcctctggtatttcaattgattctgttgataatgtttcgattacaaagtcaacttatgcaggtagtacaagcaacgttacaagcacggagacggtatctaaaagtccaacttttgatacggctaatggtacttggtcgctaactttggatcaattgacaagtggtggaacggattcagacggaaatgcaattgggcatttctacacaatcacttatcgttataaagtggcggatttaacagttggtgaggacgtgaaagttagtaacactgtcaatgctgtttccaaagacgatagtgataaacgtgagacgagtagtagcacgagcgttgatttaaaacttaatgaagttaagaaaagtggtaagtacgacagttcaactggtaaaatcacttggacaatcacggtcaatcctaatggtaatgatattgcaggagctatcttaaaagatagtttccttagtgaagcgagtgacttgacgatttctccaagtaatggataccgtatctataatactagtggcggttactgggacggcaatgacactagtgacattgcttatatccgttttacaggttctaaaaacactaaatcttatactatcacttatataacggatgtaacagacactggttggtcaagttctaaagtcaaaaatacggtaaccctagatgatgacggtgataccacaacaactgatgatcaaacaagtgattcttcgagcccgtctgtaccaggttctggtgatttgactaagagttttgtgagtgaagaagatactgatgattccgatgtcaaagttcttaattggaaaactgaaatcacgatgccagatagtggagtgattgaaaaaggaacgacatttactgacgttttgacgaaaccatacgctcaaaattcagaaattcattggtattcaaaatcacaattagaagatttatacacgcagttagttagtgtctttggtgaaggcaatttcaccttaaaagcaaggcaacggtcttcggggtcttatacagattatgcaaacttggatgatagtgttaattacacagagtttgtcattacgctaacatctgattttacctcaactgataatgtatcatttgagtatgcttcgacggctaagttgagtggtggagccacgttagattttagaaatacaatcacttctggggatcacagtagccaggttgactatcaccatactagcaatccaaatgttgttaaaatggatggtgatgaaaacccagcaacgtcaacgaaatctagcacagatggtgtgatcacatggaaagttaaggttaacttgagtgatgatgcgacaagcatgactgttactgatacattgccagaaggtgtttcattgactggtttgacttatgggcaacactggggacaaatttcagccgttatcagtggtactagtattaccagtggtgaaaatggttggggaacgtataatattgacctaactggtagtatttcggatgataatgttgttaccttgaactttagtacgactgatggtcagacactgaagaataatattggtggaaataatgatttctggttaacctttacaacgacttataatgacctacctgaagaaggaacagttgtaacagataccttaaccaatacagtatctgttatcgttgacggtgaccaagattatggttctgatagtcagacacagaatgtaacgattggtaaagaaaaaactgaaaccactccgatgactaagactggtacatgggataataacaatcgtgctttgcactatagtttatccattaattcaagtgctgaggacttggttgacggaacggatgaactgactttgacagacgttctaacgttttatggtgcggacatttcggtagcactaaaccaaagctcggttaaactttactacgctgatagtggtgaggaagttccaacaagcgaatggtcatggaaagtgtcgttaacggataacggttatggaacctatacaagtaccttgacggttaccttgaaagatgccacagcttatacgctcgcctatgactatcttgtttcaaaagaaaatccagatacgtctagtacgtattggccaaccaatacagctaccttatcaggacttagtaatggatcgactggaacaactactgaagtagcatggtcgaagattggtactgatgcaggaattgataccgaaaaatcatacacgattaataaggttgatgcggataactatggtttaggtttggcaaatgcggtgtttactgtctataaatatgacggtgatgacgatgatagcaatgatgaagccattgcaacctatacaacggatgctaatggtcacattacaatcacgaagtcaaacctaccgtcaacatttacagaaggtaatttctattacttcaaagagacaactgcgccgtcaggttatgagttgtcggatagctcaagtaagtattacttctactacgatacggagaatacgataacgccgacaggtgtccttagcggtgcggtcaacttagccaaggtttcggattcggcttacgttgaaaacgaaaagattaagacaattgatttaaccgttgataagaaatggtttacggctgatggtgatgaaacaagtcgttctgatggttctatcacttatgatgtgattcaggttgcaacggcagaggacggaacttcgaccgaatcaacttataagtctggggaaacgttaagtcatgatgataactggacgaaaacttatacagaattacctgtttcgggtacggatacgtctggaaatgcggtcacttatacttactacgttaaagagaacgctgtttctggttatgatacgagctacactaatagtaatggtgatagttctacgactgctgccgatatggcgattgcttcggattctgcagagataacgattgagaatactgctcagaagcaatacgacttgcctgatactggtggtaatggaacgcaatggcattacatagctggtgcggtgttatcattgcttgctattggcttattaatctttaaagtctataaacgttatcagataggaggtcacctatgatgatgactagtttatatattggtaaaggtggtgttgcttagtcgacagcctagccctaatttatgatatttcatatttttaatctactcacactaaatcaaaaaagaaagaaaaggaattattatgaaaaagcttaaattaatttttgctacattgttatcggttcttttcgcctttacaggtggaaaagctttcgctgatgattcaacttatacgttgacactcgacggaacaacaacaggtcacacttacgaagtttatcaaatcttcgctggtgatgtttcttctgacggaactaccctttcaaatatcacttggggttctggtgttactgaatttactttcaatggtagttcagatgcagctacaatcgctgaaagtcttgacggaactactgatgattctgctactgctcaatcatttgcgactactgctgcagctaacttaggtacagccacagcaactgtaagtagtacagcttctacaacaactatttctggtttggcagctggttactacttggtaaaagatgctgatgattcacaatctggtgaaaacagctcatacactcgtttcatcttgaaagttgttggtgatgcaactgctgaattgaagagcgatgttccttctgttgagaaaaaagtacaagatactaacgacacagctggtacaactactgattggcaagattctgctgactacgatattaacgattcagttcctttccaattgactgctacattgccaagcaaccttgatgactacactgaatactatcttgaactttcagatacactttcagatggtttgacttacaatggtgatgctaaagtttaccttgtaaatgatgatgaaaaaactgacgttacttcatcattcacaatcgctgatgatggttcaagcttcaaaattaacaacttgaaatcacttgacggtgttacttcatcaacaaaagtagttgttgaatacacagctactcttaacgaaaatgctgttattggttcagaaggtaacccaaatactgtaaaacttatctactcaaacaaccctaactacactggtagcggtgaaacttctccaactggtgaaactccagaagatactgttattgtctttacttacaaagttgttgtaaacaaagttgaccaaaatggtgatgctttggaaggtgctgcattcactctttacaaaaaagattcatctggtaactggaatgaagtagaaacaatctcagctggagatacaactactttcacattctcaggtcttgatgacggtgattacaaactttcagaaacaactacaccaaatggttacaacacaattgatgatgttgaatttacagtaactgcagaccacgatgtagaatctgatagcccggcattgaactcactttcaggtgatgtaacaactggtagccttgaatttacttcaagcactactgatggttctttaacaactgatgttgtcaacaaaaaaggttctgttcttccttcaactggtggtatgggaacaactatcctttacgttgtaggtactattcttgttcttgctgctggtatcttgcttgttactaaaaaacgcatggatgctaaataaacactaggcagactgttgttataggcgttaggttgcaaggtggaaaataaagcgttaatactttgtaatgagttttagaccgattggtcggctgttagagccttgttacctagcagggagtggatgaggagtgtcaacttttctttcgctccctttcctattgcaatggcgaggagagccctttattatgataaaaaagattaaagagaattatttgacgattagcctcgtcggcatattattaatcgggctgtccttgttattgtatccgacagttagcgattattggaattcatttcaccaatctgaggcggttgctggttatgtgcaagatgttgaggatatgagtgagcagaagaaggcggagatgttgtctgctgcgcaagcttataatcagacgttgcaaacaggggttattcctgatttgaatttgtcgagtgctgagactaagacctatgaccagacgcttgatgtgactggtacggggattatggcttatgttgaaattcctaagttgaatacgactttgccgatttaccatggtacggatgatagtgtcttgcaggtggctattgggcatatcccagggacgtcacttcctatgggtggtaagggaacgcacgctgtgatttcgggtcaccgtggtttagcgtctgcgaagttgtttacggatattgaccgcttggttgagggcgatacgttcatgattcaggttttggacgagacgttgacttacgaagtggaccaaattttgacggtaacgccagatgacgtgtcggcgttagcgattgacccagagcaagactatgtgactttggtgacttgtacgccgtatggagtcaatacgcaccgtctcttggttcgtggtcaccgtatcgctaatcaagaaagtgctgcgcgtgtgacatctgaagccagtcaggtgaaaccattgatggttgcgccattccttggaatatttattttaatcgtgcttttattggtggtaaatgtttaccgcagattacgacattaatgcaaaagcagctggacatttcgtgtccagctgcttttttggttgaagaatttttttgctatttgctttaatttccttgctttcaatttttagctcaaactgtttgggcgacggtaggcatcatttttgtgcttgctttgctcgcaagtatttctgaaattgaacagcaacaatcattgttttttccttagttggtgtgggttgtagggctgacagttcggcaggaaatccaaggcatttcaaagttttcgagatgtgggagagactgcgttttttatctgcaaataggtgtcacgtgttactgtggttttcgggttgcgaagtcaacgaagcggaatttttcgagtttgtgtctgctttcggtgaattggaattggtgtttgttggcgaggtaaacttttgatttgacagagacgacgtggtgttcggcaccgatgtcaaggagtagtttgtcacggtcagttagctggtcaatggtgatttctttttgagcgtaagcgatgatgaggtggagttggttttcaaggtaatcgtaaatggattgttcggcgatttctcgtgtcatatttggcacgatttttttgtctaaataatcaatgtcaaggacagaagcggtgccgtcaacgacacgttggcgaatgattcgccagacaaggttatttttcttgaaacctgtcagcgcagctaatttttcatcaacgataagtttatcaatggcaatgacattggttttggaattgatatggtgagcgtcgaccagttctttatagcttgtgagctgtgaaacgggaaaatcaatctgctcgtgcttgatgacttgagagccagaaccgtgaattttctggataagccctgcttcagcaaggagactaagcgctttgcggatagtgtcacggctcatatggtaggtctgggttagctcgttttcggtggggagatagtcgcctgcttggtaaatgccagaggtgatatcgtgttcaagttctttaaagatttgttcgtattttttcatgagttgtgttgaaaaattccttaagttttctaaagttgtttttaaattaccatacaacttgaaaaaattcaagaaaaaatgtgcttatttatgccaaacaacttgcagacaaaatagaaaacgattacaataaccttgtaaataaagctagcaactatttatagactaacgaaggagtcggttttaccgaagacatatgggaaaatttgaaagagatgcccgtgaaatgcttgaagctatcggcgggaaagaaaatattgcggcggtaacgcattgtgcgacgcggatgcgttttgttttaaatgatgagagtaaggcggatgttaagcgtttggaagccatccctgcggttaagggaacatttacaaatgcagggcaattccaagcgattatcggaaatgatgtccctattttttataatgattttacagcggtttctggtatcgaaggggtatcaaaagaagcggctaaatcagcagcgcagaaaaatcaaaattggttacaacgtgcgcttgcaatgttggcggaaatttttacacctatcattccagcgattatcgttggtggtttgattttaggttttcgtaatatccttgaaggtgtagaatggtcagcattgaatggtaagacgattgttgaggtttctcaattttggtctggtgtgaactcattcttgtggttgccaggtgaagcgattttccactatttaccagtgggaatcgtctggtctgtgacacgtaaaatgggaactagccagattctggggattgttctggggatttgtttgatttctccaaaccaactgttaaatgcttataatgttgccagcacatcagctgctgaaattgcggcaaactggacttgggattttggtttctttacggttcaaaaaattggttaccaagctcaagttatcccagcgcttttggcagggttgtctttggcttatctggaacggttctggcgtaagcatattccagaagtgatttcaatgatttttgtgccgtttctatcattgattccagcattgattttggcacatacggtgcttggtccaattggttggacaattggtaaaggtatttcagcagtggtacttgctggattgactggtcctgtgaaatggctctttggtgctatcttcggtgcactttatgcgccacttgttattactggtttacaccacatgactaatgcgattgatacacaattgattgcggatgctggtggtactgggctttggccaatgattgctttgtcaaatattgctcaaggttctgctgttttggcgttttatgtgatgaatcgtcatgatgaacgtgaagctcaaatttcattgccagcagcgatttcagcttatcttggtgttacagaaccagcactttttggggttaacttgaagtatgtttacccatttgttgcagggatgatcggttcaggtattgcagggctattctgtacaagtttcaatatcacggctaatgcgattggtatcggtggtttgccaggtattctttcgattcaagcaaaatatatgggcttatttgccattgatatggtgattgcaattgttattccatttgttttgacatttattttccgtcgtgttggtttcttgacaaaagctgaagatgaagtgaagtcagatgaaaattcacaagttcaggcagttgttgaggctaaaaaggatgcggaagtgcctgcaggaacagtgatttctatccaaagtccgcttgcaggacgtgctaaaaatttgagtgaagcaccagaccctgtttttgcccaaggtgttatgggacaaggtgttgtgattgaaccgacaaaaggagaattggttgcgccagttgacggtgtggtgtcagttcttttcccaacaaaacatgcgattggtttggtttcagatgaaggtcttgaattgttgatgcatatcggtatggacacggtaaatcttgacggagacggctttacagctcatgttaagcaaggtgatagagtgtcggttggtgatgctttgattagttttgacatggcagctattcaagcggctggctatcctgtggcgacacctgttattgtgaccaatcaaaatgatttccagacggatgttacgcgagaattgccgtgtgatgttgcgcgtggggaagcgatttttacagcaagtaaattgtgataaaggagcaaaaattggcatttgataagagaaaagtcgtttatcagatttacccaaaatcttataaagatacgacaggcaatggcgtaggggatttgcgtgggattattgaaaaattaccctatttggaagaattaggtgttgatgtcatctggctcaaccctttctatccaagtcctcaacgtgataatgggtacgatatttcagattatacagcggtcaatcccttatttgggacaatgactgattttgaagaattaagtcaaaaagctaaggaacatggtattgaattaatgcttgatatggttttgaatcattgttcaatagagcatgaatggttccaaaaagctttagctggggacaaatattatcaagatttcttcattttacgtgatacgccgacgaattgggtttcaaaattcggtggcaatgcttgggcaccatttggtgatactggcaaatattatttgcatttgtttgacattacacaagctgacttgaattggcgcaatccgcatgtgcgtgaggaattgttcaaggtggttaatttctggcgtgaaaagggtgtcaagggatttcgctttgatgtgattaatttaatcggtaaagatgaagagctgaaagataatactgcttttgatggtaaacctgaatacacagaccgtccgattgcgcatgattatttgaaaatgttaaatcaagcgacatttggtcaagatgacaatagcatgacggttggtgaaatgagctttacagacattccaaattgtatccagtatagcaatcctgacagtcatgaattggatatggttttcaattttcatcatcttaaggttgactacgaaaatggtcaaaaatggacgttaaaatcatttgattttgaagaattaaaaaaccttttccacacttggggtgaaaaaatgagtgagggtggtggctggtcagcacttttctggaataatcatgaccaacctcgtgcgattaatcgtttcatagatgttaaaaacttccgtaatgagggagcgaccatgttagcggcagctattcatttgtctcgtggtacaccatatatttacatgggcgaagaaattggtatgctcgatccagattatgacagcatggctgattatgttgatgttgaatgtttaaatgcttaccaagaattactgacatcaggcaagacagaagcggaagcatttgccattattcaagcaaaatcacgtgacaatagccgtacgccaatgcaatgggatgcttcagagaatgcgggattttcaacaggcacaccatggttgaaagttggtaaaacgtatcgtgacattaatgttgaaaatgaaaaaagcggaccaatcttcactttttatcaacaattgattcgtctgagaaaagacttgccaattattgcggaaggaagttatcagtcagcttatcaagataatccttatatttatgcgtttaaacgtcattttgacggaaaacagttgttggtgttgaataacttttttgctaaagaagttgagcttgatttgccagaagcttatcagtcaggacaagttttgttaagcaattatccagaaacaaacctttctgaaaaaatcactttaaaaccttatcaaacacttgccatttatcaagaaaatttataaagcaagtaggataatgaccagaatggtaattatcaatacaatggctaaaccgtagccgatttttccaagacagctgtgtggattaatggaaataccaaacgttctgatatgtgttaagtcgtttgtttgagcaaatttatcacattcataccgattacctagtgataatcatgccaagaatagcaagacatgatgtgcaaagaagcagtttagacactccgttagacaacgattttcccaaaaagatgtcaatacccataaggatgataaatagtattaaacaagcatagagcataatcacaggatatggcgtatttccatttcccccatagcactttgagacgaatctggcgggtgaaaataaatgagcagggagatttccctgctcattttttcttcgtgattttaatgttgcgcggataagaaagacaatgctgtaaagtaaaacaagcatgcaaagccaaaagaccacaaaatttaaaatgttagccacactcggtaaatagttatttaccaagatagataatgtggcagcccctaaaacttctttttttaccaattagaaatcccacctatttcaacgtttttctttaaatataacatttttaaggtgaattttcgaataaaaaccttgtgatgtcaagggttttattcttcttctgggtaagtgaggttccagtctttgcggagttttgtcataatgtccatgacgtctttggtgtagtcaaggtgcatggcattttcttgaccagaaacggcattttccatgtcagcgacttcgtaggaaagagcgagtgcggtacttccagcttcgatgacttcttgatgtccgtcctcggtataggtaatcaccgctttttgcccacgagggtattcgtaaagttcgatatagcctttatcgtaggcgattgttccacgttttggttgtttggcgtgaaggcttaacgtcagagttgccatttcgccttggctgttagttagcaaaatcccagcttgttcatcgactcctgtcggagctagttttacttgggaagcaatttgagtcggcgttgatgtcataaaccaacggacaaaagaaagagcatagacaccaatatcaagaagtgcaccgccagctaactgacgattaaagaaacggtttgtcatatcgtattctttgtagctaccaaagttcatttgaatgagcttcaattcaccgagttttccagtcgcaatgatttctgaaagcttgcggtaaattggcatatggaaaatggtcatggcttctgctaaaatgacgtgattttcttcagctagcttgatagcttcgtccaattcgtcagcgttaagcgtaattgacttttcacataagacgtgtttgccgtttgctagggctttgcgcaaaaagttaatgtgtgtattgtgtggcgttgagatgtaaataatatctacgttagggtcgtcaaatacctcatcaatagtttgataaactttgtcaatgccatatttttcagcgaaagctagccccttatcataagtacggttagcaacagaatagagttttcgcccttgttgttgaagtgcttgcgctaattcattagcaatgacaccagttcctagggttgcccaattataatgttttttagtcatagtcgcctccttgccctaagtatagcaaaaaagtgtcagaaagtccgttatttaatctctaacaaatgcgctttatatctgctattctcacgtttttttgataaaatggttctaatagattaaaggagattttttatgactcgatatcaagacgatttttatgatgctgtcaatggcgaatgggaaaaaacagccgtcattcctgatgataaaccacgtacaggtggtttttcagatttagccgatgagattgaagatttaatgttggcgacaacagataaatggcttagcggcgaagatgtaccagaggatagtattttacaaaactatatcaagtttcatcgtatgacttcagattatgataaacgtgaagaagttggtgtcgcgccagttcttccattgattgaagaatacaaaagcttggattcttttgctgaatttgcaggcaaaattgccgattttgaaatggcaggaaaaccaaatgaatttccacttggtgttgccccagatttcatgaatgcgcagcttaatgttctttgggcagaagctcctggaacaatcttgcctgatacgacttactatgccgaagataacgaaaaaggtaaagaattactagctatctggcgccaaatgcaagaagaattattgcccaaatttggtttttcagctgaagaaacgaaagacttgcttgacaaggtgattgcattagatgccaaagtcgctaaatatgttttgtcacgtgaagaatcttctgaatacgtcaaactttatcacccatatgattgggctgattttacaaaattagcaccagaattgcctttggacgctattttcacgcaaattttgggagaaattcctgacaaagtgattgttcctgaagaacgtttctggacagagtttgctgctgactattattcagaaaagaactgggatttgctaaaggcggatttggttttatcagctacgggggcgtttaacggttacttaacagatgatattcgtgtgctttcaggtgcttatggtcgtgcgctttcaggaacaccacaggctatggataagaaaaaagcggcttattacttagcttcaggtccttacaaccaagcacttggtctttggtatgctgggcaaaaattctctccagaagctaaagctgatgtggagcataaagtagcgacaatgattgatgtttacaagaaacgtttgacatcagcagattggttggcaaaagaaacacgtgataaagccattgttaaattaaacgtgattacaccacacattggttatcctgaaaaattgccagaaacttatgctaagaaaatcattgatgactcgttgtcattagttgaaaatgcgcaaaaccttgctaaaatttcaatcgcacatagctggagcaaatggaacaagcctgttgaccgtagtgaatggcatatgcctgcccatatggttaatgcttactatgacccacaacaaaatcagattgtctttccagcggctatcttacaagccccattttacagtttagaacaaagttcatctgctaactatggtggtattggtgcggttattgcccatgaaatttcacatgcttttgataccaatggtgcatcatttgacgaacatggtagcctcaataactggtggaaagaagctgattacaaagcctttacagaacgtacggataaaatcgttgaccaatttgatggtttagattcatatggtgcgaaagtcaatggtaaattaaccgtttctgaaaatgtggctgaccttggtggtgtggcttgtgcgctcgaagctgcaaaacaagacgaggatttctcagcacgtgatttcttcatcaactttgcgacgatttggcgcatgaaagcgcgtgatgaatatatgcaaatgctagcaagcattgacgttcacgcaccaggaaaacttcgtaccaatgttacattgacaaactttgatgaattccacacagaatttgacatcaaagcaggagacccaatgtggcgtgcaccagaagaacgcgttatcatttggtgatttgttgaaagaagtttgaagctgagcattttagctcggcttttttgttgggatttgttaaccttcaaaatataggagaggctgtatttcgtttatttctcttttagcaattcttgataattgagcagcggtagttattttttggaacaaaggattaacggtatcttcaaatgaatttaaaaaaagtatgttacaataaacaatggtgttatattgtaacaatgtgataaattgtgggaaatatgtattcaaagcgtaaagactggcatggttattggtcagttggacgcataaaaataatcacttgagatttgatggtgattaaacatttgacataaaggagactgtatgaagcttgaaaagtcaatgcaattaggtgaattgtaccgtgaattaagaattgctcgaggcttaaaattgaaagatattgcgcgtgataatttatcagtttcgcaattgtcacgttttgaaaatggtcaaaccatgttagcggcggataaattgttgattgctatttcagggattcacatgaccttttcagaatttggtcatgccattaataattacgaagaaacgagtttttttaaactaggaaatgtcatctctgatttgtataacaagcaagatattgacggtttgcgtcgtctgcttgagactgataaaaataccgaatcatttgatgtttacaatcgtttaaatgaattaatgattaagattacgattcattctttggaccctagctatgttatcacagaagacgaaaagaattttttgacatcttatctttatgagatagaagaatggacagagtatgagctttacatttttggtaatacaatgaccattttatctgatgatgacttgatttttcttggaaaagcatttgttgagcgagataaattgtatttatctttgccaaatcataagaaaagtgcagagcttgtttttctgaacttgattttgaccttgattagttatcgtaaaatttaccaagcgacttattttattgaatgtttggagaaaatcataacttatcaagatatgtttgcgacgatttgcttgaatttctcgaaaaaaattattgcccatatcgaaagtgggtcagatgacctttctgatttggagcattatattgcttgcgtcgaagaagttggcaatccgaccattgttgctttcttaaaggcaaatctatcaagtctttttgaccaaaactaaacaaataaaaaccgcccttacagagattagataagggtggttctttttgtgtcatgaaaagagttttgtttaaagtttattattaagggttgcttattaaataagtggcaaaagcaaaaagataagaataggtaataaattaattaagcgtttcaacatagtagatttcctccttagattataaccccattttagcagaggaattgatgaaatcggtttatttgcaaatctgcaaatgaaaatattttaattattcttttttagggtatttattcctcgatatgaatactcaaagtatcagtgtcaatgcttgcttgtgcgccgatagtgattgtaaagagtggctgagtgtgggcaaaatcaaggtcatacatgacaggaatggttttaagaagtgagtgtttgtctaggatataggttaatatttcgggtgtcatttggcattcctttgggaagcgtccgataagcaccgcttttggattggggtaagcttgtaaaatggctgctaaattgcggtcaaagtcaaggtaattatctgcttctgcttgctctaagaaaaggacataatcgttgacttgaggggtgtaaggtgttccgcgaagaagtccaaaagtagataaatttccaccaataatggtgccagaagctttccctgcgttgtaaattttccattctgttggcataaaatggcgtggttgtgttgggtcataccaagggtcgcttgaccactcttgacttggaacaagatcataagctgattttgtcatggcatttaaccaagccttgctctggtaatcttgaccttctttcattttaaaactagaatatgacggtcccatgtaagtgaggtttccagttttagcaaaaatagcattcaaaaaggctgtcgaatccgaatacccacagatgattttagggtgtttggcaattaagtcgtagtcaagatagggcaacagttcgttagaattaaaaccaccaatcgtagccagaatagcatcaacagagtcatcagcaaaagcagcgtgcaaatcagcaacacggctcttgattgaagaagaatagagcatatcagattctaaataatgttctgaaaatgacacacgaaatcctagattttctaacgtttctttggcagaaaggttggcttcaaatccacccaagcgagcaattgaatctgacggactgagtacgcgaatgtgactgttaggacttagttttttcataaaacacctccaaagatttttagtattatagcataaatcccgtattttacaaggaaatagaatcggtaagataagttcagaatttaagaaatctacttgacgccatttagattttaaggtagaatattatttgttatggcggtatagccaagtggtaaggcacggctctgcaaaagcttgatcgtcggttcaaatccgtctaccgcctttatataatgtgtttacacccaaaagcccgattctgtcgggcttttgtttttgtgataagggaacaagaatttatcatggcagatattttatgataggaagtatgcaaaaatctttgccaaaatactttaaagaaaagcttttttaaggtcgcatttgacttgtcaaaatggggcttttatggtaaactatgatagttgtattatgcaacaaatactcattctggatgtattgtgaacctgttgctctttatgggtgggtttgcaagatgaagtctgggagaggaaaaaaacattataaaaaggagaaactactcatggcagtaatttcaatgaaacaacttcttgaggctggtgttcactttggtcaccaaactcgtcgctggaaccctaagatggctaaatacatcttcacagaacgtaacggtatccacgttattgaccttcaacaaactgtaaaaatggctgatgcagcttacgaattcgttcgtgatgcagctgctaacgacgctgttatcttgtttgttggtactaaaaaacaagctgctgatgctgttaaagaagaagcagaacgtgctggtcaatactacatcaaccaccgttggttgggtggaactcttacaaactgggatactatccaaaaacgtatcgctcgtttgaaagaaatcaaacgtatggaagaagatggaacttttgaagttcttcctaagaaagaagttgctcttcttaacaaacaacgtgctcgtcttgaaaaattcttgggtggtatcgaagatatgcctcgtatcccagacgtaatgtacgttgttgacccacacaaagaacaaatcgctgttaaagaagctaaaaaacttggtatccctgttgttgcaatggttgatacaaacgctgatccagatgacatcgatgttatcatcccagcaaacgatgacgctatccgtgccgttaaattgattacatctaaattggctgatgctgttatcgaaggacgtcaaggtgaagatgcagatgttgattttgcatcagaagcacaagctgactcaatcgaagaaatcgttgaagttgtagaaggcgacaacgaataagattttaaggcttaacagtctttgatatgctttaaaacggggcagaaagcaaaccgctctgtctcgtttttattattttggaaaacaaaaaatcctggaggacataaaaaatggcaattactgcagctcaagtaaaagaattgcgtgaaaaatcaggtgctggtgtcatggacgctaaaaaagcacttgttgaaactgacggtgacatggaaaaagcaattgaattgcttcgcgaaaaaggtatggctaaagcagctaaaaaagctgaccgcgtagccgctgaaggtttgactggtctttatgttgacggtaacgttgcagcagttgttgaagttaacgctgaaactgacttcgttgctcaaaacgcacaattcgttgaattggttaaagaaacagctaaagctatcgctgaacaaaaacctgctaacaacgaagaagcacttaaagttactttggcttcaggtgaaactttggaagcagcttatgttaacgcaactgcaactatcggtgaaaaaatttcattccgtcgtttcgctcttatcgaaaaaactgatgaccaacactttggtgcataccaacacaacggtggacgtatcggtgttgtaactgttattgaaggtggcgacgaagctcttgctaaacaaatctcaatgcacgtagcagctatgaaaccaacagttctttcatacgaagaacttgatcaagaattcatccacgatgaattggctcaaatgaaccacaaaatcgatcaagataacgaatcacgtgcaatggttaacaaaccagctcttccacacttgaaattcggttctaaatcacaattgtctgatgaagtaatcgctcaagctgaagaagatatcaaagcagaacttaaagcagaaggcaaaccagaaaaaatctgggataaaatcatccctggtaaaatggctcgcttcatgcttgacaacactaaagttgaccaacaatacacacttcttgcacaagtttacatcatggacgacagcaaaactgttgaacaataccttgattcagtaaacgctaaagttatcactttcgctcgctttgaagttggtgaaggtatcgaaaaagctgctaacgactttgaatcagaagttgcagcaacaatggcagcagcacttaacaaataagaatagcttgctaataaaactaaccacctgagatagaaatctcaggtggtttttgtgtggatgtcttatcaaagaacttgacttgtgtgtaaaattgtagggactaacagttgttttttggaaaaatcataaaaagattataaaaattcttaaaccgttttttatattgacaaaataatatcattagttataattaaatcaacgaaaggacgatttatgatattaagaaagtataaggatttttgtcaattattcttgggacgacttattagcaattgcggtgattcgatttataccattgtgttatcgtggtatgtgttagaaatgactaatagtgcttggtatgttggcgtattaaactttttaatttttattcctaataccttttcttttatttttgggaaaaagattgattctttacccaaaaagcatttattggtatttttggagttggcacaattactggctgttttgggaattgttttaggtattgctttgagaggtgtcaatgctaatcttagtttagcgattatttttagctgtgttttcattgcttctacggttggattgaatacctatactgtgcaagatgctttagttcctaaaattgttcccaccaaagatttagctaaggcagagatgtatatgtctgtggcttacaatgggacggagtatgtttttactgcaattagtggtttcttactttctatgctgagctatattcccttgctgttaattgatgttttgacatttttgagttcaattttactttttaggcaaatatcatttaaagaaaagattgaaaagacacgtgagcagacggatttttggagtggtttacgttttatctggcaaaataaagtggttttctctattacattgggaggggctattgtcaactttcttttcggtggttttaatgtttaccaattattgattgctaaagatgttggtaattcagccttttatggactgttagtttctgcctgtgctgttggcactttattgggaactacggttgttgctaattttgtgttacaaaaattcagcttaggacaagccttctggctagcgactgctatttttggaatcgggattggttctacggcaatggtgcatagtcgtttggtattattgctgatttggtttgtttcatgtctttttcttggcataacacacgttgctcaaaagcctattttacagacagagattcctgacgagcatcttggggaggtttttagtgctttctatacggtgacaattccaactctagcaattggttcactcatttttgggtatgtcgctaaaaccatgtcgtggcgtctgtttcttgtcctatttgcaatggctttattactagttagtttactttatttctcaaatcgtaaattaaggcattatgatatttcctaaagctttattaattgttataatattaatggagtggagggcgtatgattactgatattgcgacgttgattaaaactaaacgtaaagaaaaagggctaactcaaaaagagttggctgaaggtatttgtgctcaagctgtcatcagcaagatagaaaaaaatgaaacaacaccgtcagtcgatttgtttttttaattggttaaaagactagatattgacatgtcagtagtctctgaaatttttgaattaacaaacgccattcatcacaatagagtttattctgataaagttaaacaattgttgtatatgagggattatgaaaatctggtgtacgtcttgaaagcactagataatactagtatgacaacagaggaacttttgtattatgattggttgctggcgattactgattatatgactaaacaggttaatctaccagaaaccattcaaaaattagaaaaattgttacctcaagttaaaaatcattatttccaactttatttaaaagttgtgtcagctattgctagtatttatagtgagaatcatgaagatgagctagctttacaatattttgagtcgattattgatgattaccaagttaatgatgattttcgtgaccgtgtgacttttctatatagcatttctcgcgcttattttgtaaaaggcgatatgactaactctttgacctatatttcaagagccatagatgagattttagagaaaaaatcaatttatttattaggtgattctttattgatgaaagcctatgttttagatgaaacaaaactctatgaagaggcaaaaaaatactgtcgcaatgccattaccatttttgaactagagaataaagaattactcaaaaatatggctcaaaagttattgatagatattgaagaaaaaatttaaccacccaaaatacttatctcaggtggttttgtatgcttgagaaatcttgataacagttgataaaaaacaatattaaaagagcttagtttgctttctaagctcttgtttttgttttagctaaatgctcctaagccgagaattgttagtgttcccatgattagtcctgcgaggataacgccgagcataactgcaataacgctttgtttgaagttccaatcaaggattgatgcggctaatgttccagtccaagcacctgttccaggaattgggataccaacaaagagcaataaggcgataaatagtccacggtcaccagccgtctcagctagtttttttccaccgttgtgaccttttttcaaacaccaagtaaagaaaccaccgataactggtttatctgctccccattcaagcacacgacgtgcgaagaagaagataattggaacgggaagcatattgccgacaaccccgataataagtgcttgccacattggaataccagtggcgattgcataaggaacagcgccacgaagttctacaagaggaaccatggcaatcaaaaatgtaataatatagttcatttacttgaaacctttcatttgttacagattttattgtatcctatctcttgagcaaacacaactaaaatctgtctttcgttgaaattcttttgccttattttggactgaaaatggcattatgattggtgtgattggctatttgattacctttctttgacaaggagtattaactcgtgctataataacgataacaacaagaagaatatgtacaaaacttgtacaagaaaagcaccctgtccgccaagactaagggtgcttttttatgcgttgctaacaaccttgcaacgtctcagagaaggacaactatttttcgttatcatcaaaatgcttctctatccatttcgttccaaatagccgtgctagaggaatcacaacaagatttactatgttgcgaatgataacgaaaagaagaatatgaaacaacaacttgtacacctcctttcgcaggcgattgggggttttagttgccaaaaactattataacataaattaaagcgtacacaattggggtgttagagcactcaatttttgcttgctgaattcgctcaaaatgctgtattggatagattgcctttatttttatgaaacttgagatggagatattaaatttatctaaattagtagggcttattctcccctaaaaaggatatttttgttataatgatagtcagttatagtcaaagatagtccatttggaaatggtcattaatcttgaaaaggaggaagctaatggcaaaaaatacatctgatagtattgaagaatacattaagcaattacttgcccaatcaggtattgctgaaattaagcggtcaaacttggcagatacctttcaagttgttcctagccaaattaattatgtgattaaaacgcgtttcacggaaagtcgtggttatactgtcgaaagtaaacgtggtggtggaggttatatccgcattgccagagtgcgtttttcagatcaacatcaaatgtttggtaatcttatgtcaaacattggtgaacgtattagtgagcaggttttcacggatttgattcagttgctgtttgatgaaaaaatcattactgaacgtgaaggaaatttgattttagcaacggcttcggatgatgttcttggcaaagatgctccagagattagggcacgtatgttgcggaaaattttacaaagattagatagaaaaggattccatttatgagtgagtattcgataaaaatgcaagaggttttcagtgttgctcaataccaagcagcgcgttttgaaagcccatatttagaaagttggcacgtccttttagctatggttgctatccatgactcagtcgcagggctaacatttgcggaataccaaactaaaattgcctatgaagagtatgaagcggcagctgttttagccattgggaaatcaccgttaacggatgttgatagagttcattttgtggaacaatctaaagctcttagtgatgttttagcatttgctgagtctatttgtcaggtgactggtggtaacgaaatcgggacagaacacgtgctttatgcgatgttgttaaaccttgatttatttgccacacgtttgttagaagttgctggttttaaaaacaaagaagacggtgacgctgctcgtttgattgatttgcgtaagagtttggcacgtaatgctggttttacaaaggaaaatatcaaagctattcatgaacttcgtaagccgaaaaaatcgacaatgggcggtgctttttctgaaatgatgaaaccacagtcaacagcgggggatttgtcagatttcacgcgtgatttgacagagatggcacgtcaaggaaaattagagcctgttatcggtcgtgaaaaagaaatttctcgtatggtgcaggtgcttagccgcaaaacgaaaaacaatccagttttagtaggggaagctggtgttggtaaaacggctcttgcttacggtttggcacagcgaattatcaatggtgcgattccgtatgaactccaagacatgcgtgttttagaacttgatatgatgagcgttgtggctggtacgcgattccgtggtgattttgaagaacgcatgaaccaaatcatctcagatattgagggagatggtcatattattcttttcattgacgaagtgcatacgattatgggttcaggctctggaattgacagcactttggatgcggctaatattctaaaaccagcgcttgcgcgtggtacgcttcatatggttggtgcgacaacgcaagaagaatatcaaaaacatcttgaaaaagatgcggcgctttctcgccgttttgctaagattactattgaagaaccaagtgttgaagatgcttaccaaatcttgcttggactaaagaaatcatatgaagattttcataatgtggtgatttctgacgaagctgttttaacggctgtcaaagctgcgcatcgctatttgacaagtaaaaatcttcctgactcagcgattgatttgcttgatgaagcaagtgcaacggttcaaggtttggtgaaaaaagaagcgccagctactttgacacctgctgataaagctattttggaaggtgatttcaaattggcaacgaaattgctgaaagagtcacgcaagaagccaaatcgtaaaccaactgctgtgacagaagatgatattatggcaacgctcagtcgtttgtcaggtattcctgttgagaaaatgacacaggcagatagtaagaaatacttgaacctcgaaaaagaactccataagcgtgtgattggccaagattcagctatttcagcgattagtcgtgctattcgtcgtaatcaagcgggcattcgtacaggcaaacgtccgattggatcgtttatgttcttgggtccaacgggtgttggtaaaacagagttggctaaaacactagcagaactgctatttgatgatgaatctgctcttattcgctttgatatgtctgagtacatggaaaaatttgcggcgagccgtcttaacggagctcctccagggtatgtcggttacgaagaaggtggtgaattgactgaaaaagttcgcaacaaaccttattctgtgcttctatttgatgaagttgaaaaagcccacccagatattttcaatgtgcttctccaagtgttggatgacggtgtgctgacggatagtcgtggtcgtaaagttgatttttcaaacacgattatcatcatgacgtcaaatcttggggcaaccgctttgcgtgatgaaaagacagttggttttggtgcgcgtgatatggctcatgattatgaggcaatgcaaaaacgcatcatggaagaactcaaaaaagcttaccgacctgaatttatcaaccgtattgatgaaaaggttgttttccacaacttaactcaagaaaatatgcgtgatgttgtgaaaatcatggttaaaccattgattgcgacactagctgaaaaagatattacgctaaaattccaaccatcagcattgaaatatttagccgaaattggatacgacccagaaatgggagctcgtccgctccgccgtactctgcaagacaaagttgaagatgaattatcagagcttattctatcaggcgaattggcaagtggaaatacccttaaaatcggcgtttctaaagggcaactcaaatttgatattgcttaataataaaataaaaacagctgctaagtttaacttagcagctgtttttgggtttgttgtcggtgaaatttcccaatcatcgtaagctgttaaagatttctttgacttcgtcgatggtttctgcgcgtgagacggctccgcggattttggcagcgccagcggtaccacggaggtagtgcggggctaaaccacggaattcacggacagcgattttttcacctttgaggtcgatgagacgtttgaggtgatcttctgcgatgtccaattttttgacaaatggaaggtctggcagttcttcgcctgtttcaaagtaatgattgatttgggtgaagatgtatggattgttcatggctgcgcgtccaaccataacggcatcaacaccgatttcttcaatcatgtatttagcatcgtgaacgttacggacatcaccgtttccaataaatggaattttggtaatggcttttgaaacacgagcaagtgtctcgtggtcacatgttccagtgtacatttgctcacgggtacgtccatgcatagcaagggcagacacaccagctgattcggcagcaagtgcattttcaacagcaagctcactatctgaccagccagtacgcattttgacagtcaatggaatatcgagaacagaagtgacttcattgataatgtgataaatcttatcagggtctttgagccattttgcgcctgcttcatttttgacaaccttattcacagggcagcccatattgatgtcaacgatgtcagctttggtattttcttggatgaattcagctgcgcgtttaagtccgtctgcgtcaccaccaaataattggattgacattggatgctcattttcatcaatgtgaagcatgtgaagagttttttcgttattgtagaggagacctttttcagaaatcatctccatgacaactaagccagctccaaattcttttgcaatcgtacgaaaggcagaatttgtcactcctgccatgggtgctagcaccgtacggtgaggaatttcaacatcaccaatcataaatgatgagctgagtttagtcattgattaatccctccaagtcattttcggtgaagttgtaagttttaccacagaattggcaagtgatttcggcaccgtggtcctcgtctttcatggctttgagttcttctttgccaagagtgacaagagcagcttcaaaacgttcacgtgaacaatcacaattgaagccgatttcttcttcagcaaggattttgtactcatcctcgccatagattgcttttaaaagagcttcaacgtggtcgtcagattccaaaagttttgaaatggcaggcatttcttggatacgtttttcatagcggttaatttcttcttcagaagcacctggaaggacttgcaacataaagccaccagcgacttcgaccttgtcattgtcgtcaagaagaacgttaagcccaacggcagaaggtgtttgttcagattcagtcaagtaaaaagccaaatcttcaccgatctcacctgagacaagtggtgttgaagaagtgtaagggttacctgtaccgtagtctgtgatgacaacgaattgaccagcacccatgaatggtccaaccatgacttcgccagtagcggtttttttaacatcaacgccagtattttgaatgtagcctttgacatgtcctttagtatcagccacagagataatatgaccaagtgagctatcaccaataactttgacggttactttgctgtcccctttctgattggcagctaggatttgattggcaataagtgttctacctagggcaacagtagagctagaaagtgtttgatgtttttcttgtgcagttctaaccgtctcagtgctatcaagcacataagcacggaaagaaccagattttgaaattgattttataagtttatccataagaacattataacacaaagcaaatttgatgggctagtattgtggttagtaaaagcgtaatcataaaagagtattaaaatgcatcttattgttagaatttagcatcttatattgaaaaaattccaaatagaaaaaatcagttgtacaataaaattgtcagagatgacaaatctagatgagaagaggatattgtatggaaaagtataagaggttaataatcgcttttagcattttgtacggtttgatttatggtattttgttcttgttttagaaaggggagagatctatggaacaactagaactgaatgattatcaaaaagttggtttagaagttcaaaaattggatacagatgactttttggctagtgatcaaatgaactggagcgttaccctatgctgctgtccatgttgttgctgttgcgtctaatcagacctatgcagatgtagttgtaaacagaaagtgctatagtttgaagctgtttttacctatagcactttttttatggttataagtgggtaaaaaatgagaagtgatataaattatatagttgataaaaataataaaatctacgttaaggataaatctaatatctacgagtttaaaaatatttcagatactttatttattaagtattggaatgaaattcaagaaggaaattttactatcgataatcaaaaatctcccctgaagtctcaattgttgaattttttaaattctattaaggcattttcagagcctgaaacatttgaagaacagttgaaggatatggggttagggaaaaaacagagttctttctcagactatacgattggtatctgtggtgaatctgatttagttgatatctatttaaatcatttcccatcacgttttaaaaagttggaaataggcagtgatgattcagaaaaatatgattttggattgataattggtagggaagacaatacaaaacattatctcgaattaaatgaaatcatgtttgagaaaggtattccttacaatagtttgttgttttcaaaatttgaggtcatagttggtccttatactattcccaatcaaacatcttgtttaaaatgtatgagattgcatgagttagataataacttttatggtcatattttatctaaatttacagctatctcggatagaaacgaggaagttatcacaagtgaaatcttaaatcttggtttctcttttttagaggcgcaagtggtaaaacaaattttgaattctcaagaggtagcaattgagattgaaaatattcagaaggttctttcttatcaatttttagagggaatgtgggaagagcattatttgttgaagcatccagaatgtgagctttgtttccctgctagcgaacaaaatgagcagatttttgaggtgaacttaaaatgacagtaactaaagcagataattctatatttgttgatgagaaatacggtttaataaagaatatttataatttgccaacttttgctgggttgccacggatacatgtgaaaatggcttttggggggaattattttacagcaggttttaatgcaagtggcgcaggagttacagcgcaagctgcagaaaattcggctattggtgagtatattgaacggtattcatgtcttcacccaagagaaaagattaactactcagatgtccttacccaaattgccccaacggtttttaatccaaatgccgatagttgtatagagcattatcagtggatgaaggcgattgattgtattcataattcagaagttggtgtgccagtagatagtgtttatttgacatatagaagcaatgataaagcatggattactacttcgactggagctgcttgtggagaaaatctaaatcaatgtttgtggaaagggatagcagaaatattagaacgtgatgcattccagtacatttggcgtaggcagttgccctgccgtagaatacttatcgaagaaaatgaaaccttaaaaaatttttttaataaatacattaaatccccttatattaattttaaactttatcaaatggaaatggattgggaggttcctgcaatatttggtatagcttctttcccaaatggaggctgtgttgtgggagcgagtgttagaaaaacatggttagaagcttgtgaaaagacattgattgaattatctcaaagtattattggatacgcagcattaattctagatagtaagcgagaaaattttgaagattattcaaaaatcaaagaatatcaagaccattcattactatatatttctgataacatgacaaaacatttagcttttttagataatggtggtacctttaaaattcctaatgaacacaaatcagatgatgataaaaaaattgctgaattttttattaatgctgtgaaaagaattggcaaagcagtttattttgtggatgttacttcttgtgaattgcgctcatttaagtggcttgttggaaaaactttgattcctaatatgttagatattgagccaaattttattgagattttaaaatcagaacgtttagaagaaattgatcagaatttaattttacaagggaaacggacagccgaagaactccataaccctcagccgcttgtgccacatccattcccttaggagtaaatatggaaaattttaaatttacaatgattagtaatcattatgctcaaaaaatttctcagaacaataagttattacaattatttcaccaaaatacaaagcatagtaaaaagtatttgctgagaaatatgtttcaatcaagggttttattaaataatcctaactttttaaaagcgagttcgtttgtagaaaaacaatatccgctttttccaaaaattactttaaaaaaacgaacagatgataccttaatgcgaagtttatattacaggcgttctcaagttaaaattcctataaaatcaagtgctttaacagaaaagattgtttctgatttgttttggtctggatatggggtgaattttaaaggaacacgtgtaacaccatcaggaggagcattgtatccactagaattatacggtttgattttagaggattgtggaaaaataaaaagaggattataccattatagaccatctcttaatgctattgaactcatttctgacgatgaaaaagtatttgatattggttcatatatcatgatgttacaaaatttagaaaatccgtctgttattttctttacaactgctatttttaatcgtatgacttttaaatatgatgcgcgtgcctatagatacttactattagaagcaggggcaatggctcagaatatatcattggttgcaacaaaatataatctagttagtacttttattggtggaacagatgattttaaagttgaaaaagtattaggaattgatggagttaatgaaagtttagtgaattgtctatttattactaaagatgggagttggggaacatggtagagatgtattctttgaagcggggaacattatttccttacaataccttatattttatttttcaaacaacaccatcttttgggcaaaaacaattccattgcattgaacacatggtgatgcgtgagataattaatttatacccgtttttagattcaaagttaagggctgtaacaacatgtgattatattaaatttcaatgttttgataaaacttttaatttagatcaattgagtgattttataaattcacaaaagtggttgacggaatcaggttttaagttagccttatcagaaataaaacaagaagatgctctatcaaatcagacttctggagcactgttagaaactattaagggtaagaaagaaaattatgaactgacttttctagaattttatgatgcttttcagttaattaataattttagttacctattgtgtagtgaaggagtttctagctcttcaaactttagaaagaactttctcatcaataaagattcaaaaagagaaacgcatgtggacaaaggaatggttccttataatggcgttaatttcttttaccgttacatgatgataccaatgactgaatttcctaatttgagtagtatttatttcttacaggattttacaaatactattaatcaaaaaatgcataagttccgcaacttaggaatatattactcgttttgtttttgtaaatattataaaaagtatgtagaactatatattgttgtatcagaaaatcagctaataaaaaattttgagagtaaagttgctaaatacttagaagagatttatagaggttatgattatatccctattagaattggtacaaatagcaaaatacttgaatttaaagaagacctagttgcgttataccttagtgatgagttcgctaaaacaagtgaaccgctgtataatcagacacaaaaagattttattaaaaaaataatttgtttacttggagggaattgtggtaagtgaagaactttttagattaacacggataaaaaagtcttttggagaaaaaaaggttctaaaaggagttgatttaaccgttaataagggagatattgttggatttttgggactaaatggagaaggaaaatcaactttaacaaaaattttattaggactaattactcaagatgaaggtgaagttattcgaaattttaatgtaaaaaaggatgctggagttatgcttcaagaaatttcggtacctgaacgtatgaaagttatcgaatggattgatatgattaggcgcttttctaacagttcaaaaacttcagaagaaattttagaagctgttaatttatctaatgagcgtcataaatattgtaatgctttatcaggtgggcaacaaagaagggcgcaattcgcgacagcaatcgcaagtaatcctaaaattttaattttggatgaaccaactgtgggaatggacattgtatcgaagagagctttttgggataccttaatcaatttttcttttgaatctgatttgacaattattctaattagccatgatttagaagaggtatcagagttttgcaacagaattattgtattagacaaaggctttattaagttggatcataaaatggtggatatcaataagcagttgcagaataattccttatatagtctagaaaaatcaagtataactgaaaaacaattagaagcaatgaatcatttgatttttaaatatgaaaatgacgagctcctttttaccgattccgatatagatactgttgtttttgataatcatatttctgttagattgttgaacaaaaaacaaaagacattgcgtgaattatttatggaggttttggaaaatgattgatgttcgtaatatgatattcttgattcttcttgatataaaacgtgtttttagagatataaaatatgtctttttcattatagctttaccgatactattttatattgtttacacagcgatatttccaaataatgctaatgttaacggtgttccttggtcggaatattgcttgatttcaatgatttcatttggtatcatgggaaatgctattaatcttttagggacaaaggttgcagatgaacgaagtaaaaaatggtacacttatatacgagtttcccctgttaattacttttattatggattaagtcatattttttcttacttaacaatatcattgttttttacttttttgatgtttgttttagcatttttctataaagatattaacttgggattggtattgtcgttaaaaataggactagttttaaatttagctagtgtcgtttttttaatgttagcactattaattggtagactaggaagtttatcacaacccatagggacaattttatatttgatgttatcttttttgggagggctatggatgccagttgcagcaatgccaaaatttttgtcacatttagcagtacttttaccatcttataattatgctaagcttgggtggtgtctgttggcgcataaaagattagcttttaattcagttgtaaatttactagcatactttgttatttttactctgctatatgtctatttacaaaagagagaacaaatgaattagaaagaattgtttatggaaataaaaaaatattttggtgatattttagaacttaaaaaaagattggcagcttggaaggatttacctctttcagttgttattgatgaaaagtcacctaaggatatttcacttatttttggcaattattctgacaaggaagttattgatttttttgaaacaaattttcaccctagttatcgacatattattggttataagcaggaagatggctatggtgatattttagttaaatgtgattataaaagtattctttattttgaaggaattggagataaagtttacgcttattcttccgatatgacagttctgctaaaaaatagactctatgaggtagaagaatttagtagattttatgttaggattagtaaatcatttgtcgttaatattttagctgttgaaaaaattcttccagctctaaatgggaaaatattaattgcattgagtgatggtcaagagctagttgtcactcgtaaatataagaaacaatttttagaatatttggaggcttaatgtcaaaagttttaaggaagatagctataatcatttgtgttggagcaatatataatctttattttgcaattttaaatggttcagatcgcttaattttcaactttatttcttttttaattattgcttatattgaattagtcatattagatgctttattttatacatcgttgatttttcagagaaatggatacttacaaattataacgatatttttactttcaagtgtctgtgaaatactctatgcagagattaatggggcagatttacgagcttctattgaccttgttattcttggaattccacttactgtgtttggtctggtggcttggaaatgttatttgactaaagttaataatctactaattagaaaaaagaatagtttcaaagaacaactataagaataaaacgaagttgaacacgtatgtcagcttcgtttctttatgccgtggcttggacttcaagtctattttggattaataacaagaaaaatggatgagaaatagaatttctatgaaattcctagcttgccttttaattttagaatgtagttggctagtattgtggttggtaaaagcgtaatcatctgtgagaaaatcagggttttaagtctggtagtttgtttggaaaagtaaaactgccctattccttaaagtgaggagcaaggcagttggtaatttttatgatgttgcagttagttgatagcgagttgctcgcattatactagtcgattctcttagtcgttttctggtgtgacgtctttcttttcgaccttttcttggctttctttaccttcgttgaggagagcttcaacgattttttggtcacgaattttaacagaatcgttaattgtctcagcagatttgacaacggctgcttcgagttgagtacgctgttttcgaccgttgtcgattgcagcaataatgccgttattttgttcgacgaggctttcagcaagtgcggtcacggattggattgaaacggttgggctttgtgctgtgcgttcgagcattggaatggcttctttgcttgtttcagcaagcatttgaagcgcagcgttattagcattgacaatagcatcagcagttacgccagatttgaccgattgttgtagaataccgagttgggcaattgacaatttcattgtcggaatggtgttgcgacgtagcataccaagtttttgacgcatatctgatgacactttaaccatgttgcgcatttgtggcgttgttgtccaagcgacataaaggcgactgaggtattcggtgtgttgttgttccaatgtattgataacttcggtcatgcgtgccaattcgtctgattttgtttggtattcaggcgttgcgctatcaagcgtagcaatttcgttttgcaattggctagcacggttggcaccttcggtttgagtggcttcgatgaaagcaatgacaccgacaagattttcgatagatttgttattgtcctcaataagcatttcagcagagacaatgttacgtgctaaggtttcttcttgtttgacaacagcggcagccatgccatccattttttgttcaatattttgcgaatcaaaatagaattcttgcaaagtgtctttaccttgtttgaaaagtttttgcaagaaatttggtttcttttcaagttcagcaggtttagcgtctttgtatttggcgataaagccgtttagttcgcggttggtgtttttgagcaattcatctacttgaggaatttcaagtttcttttgctctgacaaaatgcgattgacagtcgtgttgacttcctcaacagctgatgttccaaaatcaagaagagcattttggtcagcaacgaaattatcaaccaaagcaggtgctttagctgtaattgctgattgttgttcaggtgacaatttgtcgtagaatgagacttgtcctgttgagctggtgtcgcttgaaacaataatttcagttgttttatctgtttttgtaatcgcattttcagcaattttatcaatatcaaagttgaaagtatcagccattagaattctcctttatgtgcaaggcaacattataagtttgtgtcatcgtcagccatcatacgaaggctaatatcaaagtcttttaaatcactttcgttcagttttctcaaggtttcgtctaatgccaagtcaaatttttccatagctgttttggcctgtgccaaacgttcctcggcattgtaataatcttttggcgattttttgattttgagataaccctctaaaatatctcgaaaacgttccatgtctgcttcgtgaagggcggttaattcttccttgttatccgcattctcaatcttttccagaatggttaagtggtctttttgaatgttgttgtaaagcttggtcaactcgggagcgtattgaagcaattctttttcttcacctgaagcttgcggtgttgttggtgaaacgtccaatttttccagttgcaacaagatatcttcctcgacactctctgctttctgaaggatacgtttagagattttgaggtccattttggattttaagtcagtgacttcagttttgatgttgcggattttgggcaatagctggcgcgcaacgacaacatattgcgtgtaatctttttcatcaaggtaattatccaaaagtttaacttggcggtcagccagtctaatactatcttttaaatcttgtaaacgttgttcggtattgactttttcaagtcgtgtctgcttggttgccaaataataaacaccatacccaacccctgcaataagaacaataggtaaaatgatttctaaaaggctctcaagcaaagcaataagaataataactccgataatagcggtgaaaataccgttttcacctcttggaggtctaccataacgtggcataatgttagtcagtccatttctatctaattttgtatttattttatcgcaaaatagtgcttgatgacaagtaatgactgtactttgagacagattttttgtttacaggtgtgacagaaatttttttagatttctgggaagagttttgctaggatttttggtgtcaatgcttgcccttttcctgcgtggcaataagtgtgcatgtacattgctggattgaaattcagctcgatacacgagcagtttggctcttctttactagcattgagattttcgttaggaataatcaaatctaccccacaaacccaagcaccgatagcgctagccatttgagctgctagttgttgataagatttgttcatggtttcggtaacgtcaattgaatcaccgccagttgaaatgttagagttacggcgtaaatcaaccttgacaccttcagggagaatgtcatctggtgtgtatccttgttgctctaacatgaggcgttcaatgtcgcctagttcaatgatttcaagtggtgaacggtgattgtagccacggagtggattttgatttttaaggtcaaccaattccgcaatcgtgtgtgtaccatcaccaaccacgttagcagcaattcgcagaagcaccgcttcgcatttaccatcaagaacgaagaagcgatattcagttccagagataaattcttcaactaaaatcgtgttatcttcagcaaaggcaatatctagagcgctttggtaagaagcaaggtcagcaggttctttgaaaattgagatacctagtccgtagttagtcgattttggtttgacaacgatagccttgtctttgacttgtgaaaaatagcggagcgcggtatctttgtcggcgaattcttgtccagctgggactgggaagcctgcttgtgctagcaatttcttcgtgactaccttattttccatgacaagtggtgtaatgtaattatctttggcagtcatattggcatttttgacgtattcaacatggtcaccatgccaaagtttgagaaactggtcattttcatcaagaatattaacgtttactcctttttgaatggcatcaaaaagcaataattgagtggaaagttccatattctcatagcctttgagggcataatgagcgtgccaagcatagtcgtgataggcttgccctttttcttgcccaaatgtttccaaagagaggtggtcaatttctgtcactaaacgtccaccaatggtcaattcagggcgttcaatctgtgctttgacattttcgagtagggtgtgataatgctctggcaaatcaaagtgttcaacgactgcttgcatggcagaaaggataaggtcagtaggtgcttcttgtggcaatttctcaagtgggtggctaagagcgatgcggtcattaagcgcttttgcgtcagcaatatcttggtcaatagcaaagctatcatctaaccaaagaagtgccaaggcgaaaaggtgcaccgtatcaagtgtctcttgggtgataccgcgattgtcaaaaggattgatatcaaaacaacgaaactcaaggtacgtaatgcctttttctaaataatcgcgattgtgtttgctgccacgaagtcggacagctgagtaaaattctttttcagcaatgagttgaccagaattgacataatgttcaatgtcagaaatataacgttcaaggctttggtaggatacttgaatgtcgtcatgattaacatagccaaggtgactattgcggagtgagcgaacaggcttatcaagtggtttgtcaagaaatccctgctctgctattggcgaagccccatacaaataagtcaataaccaacgaaaacgtaggaagttttgagctaatttgaggtagaggtcgtttttaaaggtgattagagaggtatagtcactttcttcaaaaagagcagtcacaaggtcagtacccagctccatgttgtaatggattccagacatggattggagaatcttgccatacacttttgctaaatggtcgcggtattggcgttcccagtcatcttctagactggcaatagcaatctcatctgccgatagtttcggtggcattgacaaaggccaaaggtactcatctttgttgattgagcgcccaatgacatctgtgatagccccaagaaaacgtagggcttcactggtagagttggcaatcggagtgattaactctacctgtggctcgctgtaatccgtctgaatgtaagggtgaaatgaacgacttcccaaacatttagggtgcttagtttgggcaactctgtgatttgttttactaatgcgaaggctctctctttctaagccaaaagttgcttgaaggatagggagagtcgcgggtgatttttgtagtaatccattcaatttcatggcaatctcctcattaatctaacagttctttagtgataaatatcttgtcaaaataaaaaaatagtcggtcgtttttcataaatgtaaaactattctagggaaaagttgctaaaaaagcaagatttttgacacgttttgccagaattttcaggcattttttcaggaaataaagtaactgttgcatttgtgggaaaggattactggatgaatttttaacggaaggtcgaaaaagtgtgtgtttaaagctgtttttgtcaaaaaatcaaaaaaacgttcgggaaaaataatattttgtcatcaaatattgaaaaaaagtcagaaatttcatataataaattgtaagacaaactcgcaggtgagattcctgccatgttgtacaagaaaggatgaagatacaattttatagcttggagatagatacgtgacgcttcatcttagctagtatcgtttttatttgctcgctgtacaaatgttagtatccatatcgaacagaatatgacatcagtagtagttgttggtacccaatggggtgatgaaggaaaaggtaaaatcacagacttcttgtctcaagatgctgaagtgattgcacgttatcaaggtggagacaatgcaggtcacactatcgttattgacggtaagaaatttaagttgcatttgattccgtcaggtattttcttcccagagaaaatctctgttatcggaaatggtgtggttgtcaatccaaaatcattggtaactgaattgaaatacttgcatgatgagggaattacgacagatagccttcgtatttctgaccgtgcacacgttattttgccatatcacattaaacttgatcgtttgcaagagtcttctaagggtgataataaaattgggacaacaaataaaggaatcggacctgcttatatggataaagcagcacgtgtcggtatccgaattgctgaccttttggacaaagaaatctttgcagaacgcttgcgcgtgaatttggaagaaaaaaatcgtctcttcgaaaaaatgtacgaatgcgaaccaatcaaatttgaagacattttcgaagaatactatgaatatggtcaacaaatcaaagattacgttacagatacatcagttatcttgaacgatgctcttgacgctgggaaacgtgtccttttcgaaggtgcacaaggtgtcatgcttgatattgaccaagggacatacccatttgtaacatcatctaacccagtcgctggtggtgtaacaatcggttctggtgttggtccaagtaaaatcaacaaagttgtcggtgtatgtaaagcctacacaagccgtgttggtgacggaccattcccaactgaacttttagacgaagttggtgaccgcatccgtgaagtgggtcacgaatatgggacaacaactggacgtccacgtcgtgttggttggtttgactcagttgtaatgcgccatagccgccgtgtatctggtatcacaaacttgtcacttaactcaattgacgttctttcaggtcttgatacggtcaaaatctgtgtggcatacgaccttgacggtgaccgcattgaccattacccagcaagtcttgaacaattgaaacgttgtaaaccaatctatgaagaattaccaggttggtcagaagacatcacaggttgccgtagccttgacgagcttccagaaaatgctcgtaactacgttcgtcgtgttggtgaacttgttggtgttcgcatttcaacattctcagttggaccagaccgcgaccaaacaaatattcttgagtctgtttgggcaaatatttaagaaaaagacgcttatcgagaaaatttaggatagtttaagttgttctcactatactaacattactcctaaacttttcttttcatatttatattttttaataccatcggaacttcggtttcggtggttttttgatgtaaaaaagtctcctaaggataaatcaggagacttggttatggttaattattaacaaggtcgaggatagttttgccgtagaagaagtcatgaaccagattgtcatattctgtccacatgggaagtgttttgcatttatcttttctgggacaatcaaaggatttgtcagccaagcaagcaacggatgaaagtgtgccttccatgaggtcaagaatttctccaacagtatattcttcgggttttcgacgaagcttgtaaccgccacctctcccgctagctccaataagcagctcacctgccaccatttctttaacaataatttcgaggtattttttggaaatttcttgtcttttggcaatgtcttttagcggaatatagtgcccattattattttcgacgaggtcaatcattactcgaatggcgtaacgtcctcttgttgatatcatgcgaaccacctttctaatatggcttattataccttaggaaatgttaccaaatcaagccattttaaaaaatagggtaattttgtctattaaaaattaatatttttagataatttgtaaacaaggggaagtgctaattggtagaatggtgttaaaaagttgtagattttggctttgaagtgtatctgttttatgataataaacagaaaatttaaaatttttctaaaaaagccattgacatagtaggtgaatggtgttattataatttcaattatttcagaaaaatttttagaggaggattcagacatgctaaacatcactatcgttaaacaaactgtcatgtgttgtcgaatgcaaaattcccaggcatattatctgactggggcgttcgattgcgtgtctgtacgtcccgatacagtatagtcttcgctttaaagattatgtgtagtcagttgcctggggcttcatcaaatgaagctccttttttcgtacctaaaaaatagaaaaggatatacttatgagaagtaaaaaaacttattttaatggtgctatttataagcctgatacttgaaaaaaacaggtttgaggcttatgttggtcgttttttatggatggaggtgatgcgctgctgaccattaatgacatttagtgatcaaaaggagttataaatgtttttaggagatttttgaaatgattgttaatgtcatgaagtgaaaagatgacattataagataatgttgcgagttatatgcagtagaagtaattaggaatgacgaggtgattcgttggtaaaaaatgtatttgagttggaaaacatatcaaagacatacaaaaatgatggcaaagaatttgtcgctctagaagatgttagtttgtcaatccgtgagggagaaatttttggcattattgggatgagcggtgctggaaagtcaacgttggtgagaactttaaatcgcttggaagaagtttcagctggcacggtcaaattttatgggaatgatttggcaagcttgaaaacaggggaacttcgaaacgttagacattcgatttcgatgatttttcaaagtttcaatcttttgcaacaaagaacggtaattcaaaatgtcgaacagcctttgcgaattgctggggtggataaggtaaaacgtagagaaatagctgaagaaatgctagcgattgtcggcttatcggataagaaaaatgcttaccctgaacgcttatctggtgggcaaaagcagagagtggcgattgcgcgtgcacttgctgccgacccaaaagtgctcttgtgtgatgaggcgactagcgctttggatcctaaaatcacaggagaaattctagagcttttaaaagagattaatgaaaaaagaaaattaacgattgttatcattacccatgagatgtccgtggttgagaaaatttgtgatcgtgtggcaatcattgacaatggtaagcttgctgagattggagaggtaaaagaagttttccgtgctccgcaatcaaaagtggctagaaaattagtttttccaacgaatccatttgacccttcaaatccgaatggtcggcttgttcgtattgtttttgacggtttagctgctagtgagccttttattgcaaatcttgttgaaacgacaggtaagaaagtcaatatccttagcgcaaatacaaagagtgttggtggtattggctatgggcaaatggtgctggagcttccgccagaagtgggtgatcaagaggttattattgatttcctaaagaaaaatgggcttagcttatcggaggtggttagagaatgagtcaatatatcatagaagcgattcaagttgggatactagaaacgcttgaaatgaccttcttttcagctttaatcgcttatctgattgggttgccacttggaattattttatacgcaacggctcgagggagacttttagaaaatcgcattatcaatcttgtattgggagttattgttaatattttacggtctttgccgttcttgattttattggttcttcttatcccttttacaagattagtgacagggtcttccataggaactatcgcttctattgttcccttaaccattggaacgattccaattgtggcacgcatggttgaggcgtcattgtgcgaggttcaaccaggaattatcgaagctgcaacggcaatgggagcgtcaccgttttacattatcttacattttattttgccagaagcaacgccgtcacttttgcagggggctgcgataaatgttgctactgtgcttgggtattctgcaatggcaggtgtcattggcggaggcggtttaggcgcaattgctctgcaatatggctactatcgttatcaaaaggatgtcctttggtcaacggtggctttacttgtcatcatggtgatgattattcaggaagttggcaacctaattgctaagaaaaaacgaaaatcgtaaaagaaatttgaaaatgtgaaaagaaagttgtcattttatgaaaatggattagtgaaaagaaaaggagacggattatgaaaaagaaagtattatcgttaatcgttacaggctttgtggcaaccattttgactggttgtggagctagtcaagctgccacttcaagcagtacatcagatagcaataccgtgattaaggtgggggcaaatattacaccgcacgctgaaattctcgaagaagcaaaaccaattttggcgaaaaaagggattactttagaaattgtgaaacttgaggattcgattacgccaaatacgggagttatcgagggcagtttggatgccaattatttccaacacgttccttatttagaacaatttaataaagaaaatgactctgatttggtatccattggtgctattcactatgaaccttttggaatctatgctggtcgtgtaacgaaattatcatcacttccagacggtgctttagttgctgttccgaataatgtaacaaatgaagcgcgtgcactactcttgcttgcacaagagggaattattaccttaaatgacgatgctggcgtaaatgcaacggtagaagatattaccgataatccaaaaaatatccaatttaaagaattggcgccagaacagttagtatctgctctgccagatgtggatattgccgttatcaacggaaactatgcgattgaaggtggtttgaaagttagtgatgctttggcggtggaatctaacgatggtctagcagcaaaaacgtatgctaatattattgcaacatcaccagataagaaagacgatgaggcgttgaaaacattggttgaagtgcttcaaagttcagagattaaatcatttattgaggaaacttatgacggtgcagtagtgcctttggactaagtaataaaggagtaagggatgattggatttgaatactataatccagcaaaaatcgtatttggagaagatagtgagcaacaattaaccgctttgcttaaagaaaataaggtgagctcacttttgcttgtttatagtggcgattttatcaaagatttgggaatttatgctgtcattgaaaaagctgtcaaagaattaggtattgcttttagtgaaaacggcaatgtggtacccaatccagaggttgatttggttcgacaattggttgagcaaggcaaaaaagacaaggttgactttgttttggcagttggtggcggaagttcaattgataccgcaaaagctgtggcacttgggataccgtacgacggagatgtttgggatttctttgacaaaggcatttcgccaaaagaggtgttaaatatcggtgttatcgccacaacggcgtcaagtggttctgaaacgtcaaatgcttctattatttcaaatggggaatggaaacttggttttgaagatgaccgtattattccaaaatttgccattatgaatcccaaatacaccgttggtttgccgctttatcaaacagcagttgggattgcggatgttttagcccaccttttggaacgttatttttccgatacacagcattctgatgtcactgactatcttattgagggaggcattcgagcattgttgttaaatgctgaccgtctgcttgatgatttgagtgatattaatgcgcgtgctgaaattcaatggttggctagtgtggctcacaacaactttttagatgctggtcgtagcgctgactgggggtcacatcggattgagcatgagttgtcagcacaatatcatatcgtccacggcgagggaatggcggttgtgttactagcttggattcgttatgtggcagaaagaaagccttggcgtcccgctttgcttgctagtcgcgtgtttggtgtagatgcgcatgattatgatgaaaaagaaagagcgcttatccttgcggaaaaattagaagcattcttcaaatcgttagagctaaaaacgactttgacagaattgggaattgacgataaagattttgagattatggcaaaacgtgcaaccagaaatggaagcgttgggcattatgaattgcttgatgctgatagcatacaagaaattttgaaactggcactttaaaaataagtataaaaggagattaaaaatggcaagaattaaattggtagaacttgaagaagcaacaggagcagaaaaagaacgttacgatgaattggcaggtcgcaacgctgtgacaaacatgaaaaaagggcttttaaatgacgctgcgacatacgatgcttacatgggttggtacacatcatggcaacgtttggtagaagttgttggtgagaaagatgccattctctatgctcacgcgatttcaacaacgaactcatgtcaactttgctcactctttttcattagtgatgtgaaagggcttggtcttgacccagcgaatttgaattatgatgaacgtgaagaagttttgacagaattaggacgttctatcgttaaagacccaactgccgtgtctgatgaactctttgaaaaactgagaacattctttgacgataaagaaatcgtcgttatcgtcggctttgctggtcaaatgattgcgactaacaactttaactctgtcttgcaaattgatgtggataaacgtttgcttccaatcattgacgaatttaaaccagccacatggcgtgataatttgaagaaataaatttttgtaatgatagctatccattaagtaaacgaagctgggcgttagtctcagcttttttctttttgtcatttttagtagtaatagaattcaagggagtgtttcaaaaagttcagtacatttttgcacacttccttgtgttttttttgctctttttgtttgcgcttacattttctataataaacataaagaaattacaaaactaatatagaaaaggagtaatctcatggatttcctattatcaattcttaactggttttcacaaaatattttgcagaaaccagcgttctttgtaggtatcttggttttaatcggatacattcttttgaagaaaccttggtatgatgtgtttgctggttttgttaaggcaacagtaggttacatgattttaaatgtagcttctgcgggacttgttagcacattccgtccaattcttgcggcgttgaattatcgttttaatattggtgcggctgttattgacccttattttggtttgacggcggctaataattatattatggataatttccctaaattcgttgggacagctacaacagctttgttgattggttttttcctaaatatcttcttggtggcgtttcgtaagattacaaaggtgcgtacgttgtttatcactggtcatatcatggttcagcaagcagcaacggttactttgatgattattctattgattccaagcttccgcaatcaattttggggaacgttggcagtaggtattgtttgtggactttattgggctgttagttcaaatatgactgttgagccaacacaacgtttgactggtggtggcggattcgctattggacaccaacaacaatttgcaatttggtttgttgataagattgctccgaaaattgggaaaaaagaagaaaatcttgataatctcaaattaccaactttcttgaatattttccatgatactgttgtcgcttctgcgacattaatgttggtattctttggtgccattctctatattttgggaccagatatcatgtcaaatgcagacgttatcacatccggtacggtttataatcctgcaagtcaatcgttctttatgtatgtgattgagacatcgttcactttctcagtttatcttttcatcttgatgcagggcgtacgtatgttcgttgctgaattgacgaatgccttccaaggaatttcaagtaagcttcttcctggttcattcccagcggtcgatgttgcagcatcatttggcttcggttcaccttcagcggtactgtttggttttgcgacaggtcttattggacagttgattaccattctcttattgattattttcaaaaatccagttttgattatcacaggttttgtgccagtattttttgataatgcggctatcgctgtttacgctgataaacgtggtggttggaaagctgcggttgtcctttctttcctatctggggttattcaagtggcacttggtgccgttgcggtatcacttcttaatctcggtgcatatggtggttaccatggcaatattgactttgaaattccatgggttccatttgcttatcttttcaaatatgctggcgcgattggttatgctattgtctgcctcttcttgcttgcaatccctcaaattcagtttgcaagagcaaaagacaaggaagcttactatgctggtcaagttcagtctgaagagtaacagtttaaaaagtaaatgctatttataatgcttttctataaagtacaaaagaattcaaacggaggaaaataaaatggttaaagttcttacagcgtgcggtaatggtatgggctcatctatggttatcaaaatgaaagttgaaaatgcacttcgtcaacttggtgttagtaatatcgaatcagcttcttgttcggtcggagaagctaaaggcttggcagccaattatgacattgtagtcgcttcaaatcacttgattcatgaattagacggtcgtactgatggtaaattgattggtcttgataatttgatggacgataatgaaataaaaacaaaattggaagcagctttaaaataatttagaacttgtattcatgaaggtggtattttcaggtgacagatgattttcaccaatctagggagaattttgcaggaatactagatgtcttttaaaaaaaactttaacgactagtaacggaaaagcaactttctagatagaatgtcatctatgaatataagttcttgacatgggtgttttcagacaaacgaaaacacccacgatttttgataagtatgaaaggaagcagtttatgaatttaaaacaagctttgattggtaatgattctattcggctaggggtgacagcgtcagattggaaagaggcggttaagttagctgttgaacctctggttgaaagtggcgcagttaaggcagaatattatgatgctattatcgcatccacggctcagtatggtccgtattatattttgatgccaggtatggcgatgcctcatgcgcgtccagaagctggtgtacaacgtgatgccttttcgttaatcacattgactcatcctgttaaatttcaagacggtaaagaagtttctgtactccttgccttggcagctacgagttcaaaaatccatacttcggtagctattccgcagattattgcgctttttgagttagaaaattcggtagaacgcctacaatcttgtcagaccaaagaagaagttttggctatgattgatgaatcaaaggacagtccgtatttggaaggcttggatttagagagttaatatcacatttttaaaactagcaatgaagagaaaggaaatatgatgacaaaacaattaccaaatttacaagttgctcttgaccattctgatttgaaaggagctattgcagctgccgtttcggttggcaatgaagttgacattattgaggctgggacagtatgtcttttgcaagtcggcagcgagttagtcgaagtgcttcgtaatctttttccagataaatggattgtggcggatactaaatgtgcagacgctggtggaacagtcgctaaaaataatgctatacgcggagcagactggatgacttgtatttgctgtgctaccattccaaccatgaaagctgcgcgtaaggccattgaagaagtgcgtggtgaacgtggtgagattcaagttgaactttatggcgattggacttacgagcaagcacaacaatggcttgatgcggggatttcacaagttatttatcaccaatcgcgtgatgcgctccttgctggtgaaacttggggtgaaaaggatttgaataaagttaaaaagcttattgatatgggctttcgtgtatctgtgactggcggtcttagtgttgacacactcaaactctttgctggtgtagatgtcttcacttttattgcagggcgcggtattacagaagcagcagacccagctgcggcagcgcgtgattttaaaaatgaaatcaaacgtatttgggggtaggttatgacgcgtccaattggtatttatgaaaaggcgactcctaagaattttacatggagagaacgtctagcgtttgcaaaagaactcggctttgattttgttgaaatgtcggtagatgaatcggatagccgtttggcacgtctggattggacaaaaaaagagcgtttggacgttgttcaagctatttacgaaacaggtattcggattccaagtatttgcttttcgggacatcgccgttatcctcttgggtctaatgaccctaaaactgaagcaacatcgcttgaaatgatgaaaaaatgtattgaattagcgcaagaccttggtgtccgtactattcaattggcggggtatgatgtttattatgaagaaaaatccccagaaacacgcgctcgttttattaaaaatctcaggaaagcttgtgattgggctgaagaagctcaagttattctggcgattgaaattatggatgacccttttattaattctattgaaaaatacttggctgtggaaaaggaaattgattcgccttatctttttgtttatccagatactggtaatgtatcggcttggcataatgacctttggagtgaattctacaatggtcataagtccattgctgccttgcatttaaaagatacttatgctgtcactgaaaactccaaagggcagtttcgtgatgtcccatttggggacggctgtgttgattgggaggctatgtttgctattctcaagaaaacaaactataacggtccatttttgattgaaatgtggtcggaaaattgtgcgacagttgaggaaacaaaacaagctatccaagtcgcaaaagactttttattaccaaaaattgagaaagcggggttacgttaatgttagttcctgaattacgtcaacgtgtttataaagctaatatggatttaccagtgcatggtttggtcaaatttacatggggaaatgtgtcagctattgaccgtgaagaaggattgattgttattaaaccttcaggagtgccctacgaagaattatctccagaaaatatggttgtgtcagacttagagggaaatgtggttgagggcgatttgaacccgtcatctgatttaccaacgcatgtggagctgtacaaagcatttgcagaagttggtgggattgttcatacccactcaacggaaggagtcgcttgggcgcaagcagggcgagatattccttgttatgggaccacacatgcagatacattttatggcgctattccgtgtgcgcgtgcccttactccagaagaaatcaatggtgcttatgaaaaagaaactgggaaagtgattattgaagaattccaaaaacgctcccttgacccaatggccgttgcaggggttactgtccgtaatcatggaccatttgcttggggaaaggacgaacaagcagctgtttataacgctgtcgttcttgaagaggcagctcgtatggcacgttacacagaaggcatcaatccagatgtcaaagaagtgctacaagcgctcaaagataaacattatctccgtaaacatggcaaaaatgcctattacggacagaaaagtctgacacactaaactaaaccaatgtttttatccaatattcataatagaagtgacggcgtgaaatgattagtttgaatgactaatttttgcgtcccttctttttcttttacaagaaagacaaagcttgattttaaaagtcatcaatctattagtttgattatttatggaagaattgtgatgtgctgatgtgaattaaacagagcgttcaaaggtaatgttgaaaaatcctattgctgacagtcttcgtgatacaataggtttacatagatgtggaggagacagttattatgttagataaaaaaagttatgatcttctttcttacttactgactttgactgagccagagacagtgacgactatttctaaagtattaaatcagtcgcgtcgaagaatttattatcatttagataaaatcaatgatgctttgccagaggaaatcgagaagattatcccttacccacgaatcggaatccttctcaatgacgaacagcgtcaagcgtgccgtatcatgatgggagaattggacggctattcttatgtgatgagtgtggaagaacggttagaattaagcttactatacattgcagtttctaaggaaagagtaacgattgataaactgatgaaactgacagatgtctctcgtaatactattcttaacgatttgaacgatattcgtcagaaattatcagacgaagaatatgacattaggcttcgtgtatcaaaagtacgtggttactatttagcatgtcaccccttgtctaaaatacagtttttatatcgcctactttacagagtttacacaaaggataatgaaaaatttattgcgactattcgaaaacgtattatcaatttaccagaagtaatgccctatttttctgatgacatcaatgattatctttatacagaattgtcaacgattgaagaacgcttgggcaaaagacttaatcccaaagatttaaattttatggtgaaaattttgccctatctcttgttgagttaccatagtattgattttactgctgaagaaaaagaacgagcaagacgtgattttagcctagcttgggaacgtttagagtaccaaatggctattaatatcgctaaaaatttacgagaaaaattcaatctatctttagatagtatcgagattggtttgattgccatgttgttactttctttccgaaagacattggaccttcatttagaaagtacggactatgatgatatgcgagagacattgcaactttttttgaacacattacaaacaaagtatcatctttcttttcgacatcctaatgacttgttaaatcaactgttgacgcattgtaaagcattgctttatcgcaaaacctacggtattttatcagaaaatcccttaacagaagatattaaaataaaatatggtcaactttttaatatgactaaatcttgtatttatattttggaagaagcttggttaattcaaatgacagacgatgacattgcttactttgtcattcatttaggtggtgagatagaaaatcatgatgtcagcgatagtcaaaaaaatcatgttgtattagtttgtgatgaaggagtgggcattcagaaattattagtcagccaatgtaaaaaatgtctggaaaattgtgaaatagatgctattttcacattggaacaattttatagtgttagtgatatcatcacatcaaacatggttatttcaacaagtgataacgttgagacaacattgccattgttggttgttcaccccattttaacggatgaagatattatcaaaatgctacatttcataagaacaaaaggaaggcaaaaagaaagccattatgaccaacagctagacaaactgcttaaaatttacgttccagattgcaatgaacgctatggcttaaaaaaccaaatcgaaaaaatcattcgccaagaatttatcgacactagcttaaattgaggaaaatggaagcttattacatttttatgtaatgagctttttgttgtcgttggatgttggaactttcagcccaaaaatgaacacatcatcgtgtaatacttggtcttttttggaatcgctttctagactatactgttattgtaaatgaataacgtaacaacacaaataggaggaaagcaaaatggctaatgttaaagacatcacacgtgaatcatggattttaaatacttttcctgaatggggaacttggctcaacgaagaaattgaagaagaagtcgttcctgaaaataattttgctatgtggtggttaggtaattgtggtgtttggattaagacaccaggaggtgcaaatattgttatggacctctggtcaaatcgaggaaaatcaaccaagaaagtcaaagatatggtttggggacatcaaatggcaaatatggcgggggttcgtaagttacaaccgaacttgcgcgtgcaaccaatggttattgacccatttgccattaatgaattggattactacctcgtctctcacttccatagcgaccatattgatatcaataccgctgctgccattgtaaacaatccaaaacttgaccacgttaaatttgtgggaccttatgaatgtggggaaatttggaaaaaatggggtgttccagaagaacgcatcatcatcatcaaaccaggagaaagttttgaatttaaagatgttaaagtgaccgctgttgaatcttttgaccgtacgtgtcttgtgacgcttcctgttgacggtgctaaggaaaataatgatagtctgaaaggacttgctgtgacagatgaagaaatggcacgtaaggcagttaattacatttttgaaacaccaggtggaacgatttatcatggtgccgattcacatttttcaaattattttgcaaaacatggtaaggatttcgacattgacgttgcgattaacaattatggggacaacccaattggtattcaagacaagatgacctcaattgaccttcttcggatggctgaaaatcttcgtgccaaggttatcattccagtgcattatgacatctggtcaaactttatggcttcaacggatgaaatccttgctctctggaagatgcgcaaagaacgcctacaatatcaattccacccatttatctgggaagttggtggtaaatatgtttatccacaagataaagaccgtattgaatatcaccacccacgtggctttgatgatgcatttgagcacgattcaaatatccagtttaaagctttactttagtaggataaagggttggtatcagccctttattttatcagaaaaaatgaaaaggagacaaacaatgaaatttttcttagatacagccgatgtttcggcgattaaaacaattaacgaattaggtgtcgtggacggtgtcacgaccaatccaacgattatttcccgcgaagggcgtgattttgagacggttatcaaggaaatttgccagattgttgatggtcctgtgtcggcagaagtcacaggcgtaacagctgaagaaatgattactgaagcgcgtgatattgctaaatgggcagataatattgtggtcaaaattccgatgacaatggaagggttgaaagctgtcaatgtgctttcaaaagaaaacattaagaccaacgtcactcttatttttacggtatctcaagggcttatggctatcaaagctggtgcaacctttatcagtccatttgttggacgtctggaagacatcggcacagatgcttaccaattgatttcagatttgcgagaaatcattgatttttatggctttgatacggaaatcattgcagccagcattcgtaatacagttcatgttgagaacgttgcgaaacgaggtgctcatattgctaccattccagatgctgtttttgataaaatgaccaaacatcctttgacggattcaggattaacacagtttatgcaggattggaaaatttttaagggtgaataatcctaaaagttagcagaatgatttcacaaggagaaatattatgtcacaattatctgttaatgctattcgttttttaggaattgatgccattgaaaaagccaaatcaggtcatccaggagtcgttatgggatctgctccaatggcgtacagtctttacactaaacatttacatgtcaatccagctgttccaaactggattaatcgcgaccgcttcattttatcagcagggcatggttcaatgttgctttatgctcttcttcatttgtcaggatttgacgttacaattgatgatttgaaacattttcgtcaatgggcgtcaaaaacgccaggtcatcccgaatacggtcatactgatggtgtggatgcaacctctgggccactaggtcaagggatttctatggctgtcggactagcacaggcggaacgtttcttagctgcaaaatacaataaaccagattttccaattttcaatcattatacctatgttatcgctggtgacggtgactttatggaaggagtgtctggcgaagcatcatcttacgcagctaaacagcaattgaataagttgattgttctttatgattcaaatgatatttgcctagatggtgagacaaatgctgcttttactgaaaatgttcgtgcacgctacaatgcttatggttggcatactgctattgttgaagatggcacagatatcaatgccattagtcttgctatcgaagaggcaaaagcttctaacaagccaagcttgattgaaattaaaacaacgattggctacggtgcaccaacaaaaggtggaaccaatgcagttcacggagctccactcggtgctgaagaaacagctgccacacgacgtcatcttggctgggagtatccaccgtttgacgttcccgaagaggtttatgatgattttaaagaaaatgtagagaagcgtggggttgcagcatatcaaaaatggttagaaatgctcgcagactacaaaacagcctatccaaatgaagctaaagaagttgaggctattattagaggagaggacccagcaacgctcacagaagcagattttcctgtttttgacgatggcttttcacaagcaacacgtcactcgtcacaagctgcgattaatgcggcagcagcggttcttcctaattttcttggtggctcagctgaccttgctcattcaaacatgacttatattaacgatgatggcttacaagatgctgaacatccacttaatcgcaatattcagtttggtgttcgtgagtttggtatggcaactattttgaatggtatggcactgcatggtgggcttcgcgtttttggtgggacgttctttgtcttttctgattatcttaaagctgccatgcgtctatctgctctccaaggcttgccagttgtctatgttttcactcatgattccattgctgttggtgaggacggaccaactcatgagccaattgaacaattatcaggcttgcgagcaattccaaatttgacagtgcttcgcccagcagatgcccgtgaaacgcaggctgcttggcactatgctttgacacaaaaatcaacgccgacagcgcttgttttaacacgtcaaaatctagttgttgaaaaaggaacaagtttcacagccgtcgaaaaaggtgcttatgttgtttacgaatcaggcacagattttgataccattcttttagcatcaggctcagaaattaatttagcggtagaagcggctaaaaaattagttgcccaaggtggtaaggttcgagttgtttcagtaccgtcaacagaattatttgatgcccaatcagcagaatataaagaaatgattctaccaaatgctgttcgtaaacgtgttgctattgaaatggcggcaacccaaccatggtataaatacgttggtttagacggcaaagtcatcggtattgatacgtttggagcttcagcaccagcatcagaggtgattgaacactacggtttcacagttgataatattgtcaacactgtcaatcatctttaataatgttttacgatacaaagaaagttccttctaatctcctcgggagctttcgtacctactgtatttgataactcccttaatacagtagatgtttttgctaatacctaacattaaaccactgaatctttgtatttagtggttttttagtggtttcttaaattaacgatttgatagatttcaaatgtattttatgacttagcctagtaaaaatagtttttgacattattttatctgtatgtatggtgattaacgatttcaaaaaatgacaatagattggaatgagggaagagattcagtataatatgcagttaaagggagggagattatgctcaagttaatggatgtaacattaagagaaggggagtatgtagataataactttctaactccaggtatatctcggaaaatcgtatcaaagttacacgaaacaggtattgattatattgaaatagggtatttaggcgatagttcaaaaaattctggtccacaaaagtgcgattcagcttatttagattttttaacgtctaatgctataagtggatgggaaaattgtttttctataatgattcaacctagttatttttctgaagacaatattgaagtttttaatgattctagagtagggatggctaggataactgttacagaagaaaatatttgtaaagtggagcaaataattaaaattttagaaaaatataatgtcctcgtcagtgtaaacgttattcgtagtagcaggtacggtattgaaaaatttagcgaactagtaaaaagaatttcacagagtaatgcagatattatttatttagcagattctaacggagcaatgattccggaagatgtgaggaaacttttaactatttcgaaagaaattattaaaaagggtaagagacaagaattaggattccatgctcataatcatttaggtttatcaatttcaaatgctttaactgctatagattttggttgtacatatattgacgctagtcttttaggatatggaaaatcttcaggaaatttaccaatggaaatttttattgctttactagatagaatggaatgtggaaaaaaattggatgtttggagcatattaaatttgtctaattctatttatgaatcagttaattcatcgggattttttggtcacacctcagagggggcttacatcggtatgaaaaatcttaattgggatgaggtcaataaaatttatgctaaaaataatataacatctttacttaataaggaggcgggtgaatttgaatcaaaaactaaacaatcgcgaatggctttttaaaataggtgacggtttagataagattattgttctacctagaaaagatggaagaacagttacagtagaagaatggcaaaaactttatgatgtattaggtaataaatgttctattgttataatagatatcccagagtatttatgcaaattcaatgtccaaaattgtaagacaacttcagaaatggctgatattttgcataaaattttaaaaaaagaagaattaaataatataaaagtctttattggtgtttctttaggaggaatgattcttcaaaaatatttatcaaaatattcaaatattccatcagtgttcatttcaacaatcattgaacaaaatcttaaaattaccactgtttttaatagttggaaaaataatttatattgcttaggagaacaatcattcaatctcaatctattatcatgggtattaaaagatagtacaattactgacatccctaaatgcaatgatgggttttcagctgaaaaagagttattgtctttggatgctatattacaccatggatttgatagcattaaaaatgttagttcaaaaaaatcattagtaatgtatggaaaagatagtcccttgattaatatggaggaagcatctgcttttacaaaatattttagcgatttacttatttatccggtatcatcatcaggaatgcgggtattggaggataatcccaaagatagctataaaatgcttaaggattttattgagaggtatctatgaaaaaggtagctgtattaccaggtgatggaataggaaaagaagttatagaagtttgtataccaattattaataaattagggttagatataaatttaatatttggaagtatagggtgggagaattgggttgagtcaggaaatcctgtacctgatgaaacttggcaacttataagtagtagtgatgcagtgctattaggagcagtgactagtaagcctaaaagaatagcgcttgaggaactaaaaataccgattcaaaatgatattgagtatatatctccagttattcagttacgacaaaagttaaatttatttgctaatgtaagacctattgtagcttatggtggtgataggaattatgagttttatattattcgtgaaaatactgaagggctttatagtggtcttgattttaaaccaataccatcaagtcttaaggattttatttgtgaaaaaaatgcaaaatttaaaaaattatctgttgatgatgcagcgacaattcgaattattacagaatctggttttgacagattattaaagtttagttcggattgggctatttctcatggaaaaaaagaaattgttatagctgataaaccaaatgtatttagaaattctagtgagttaatttttaatcttattgaaaagtattcgaaactttatcctactttaaattatagagtagaaaatgtggatgccgttgcaatgtggatggttagaagaccagaaaaatatgaggttatagtatgtgaaaatcaatttggagacatactatctgatgtaggagcagctgtaatggggggattaggcatggcttatagtggaaattttggcatggctagtttagcttattttgaaccggtacacggctcagcaccaaaatatgtagggctagataaagcgaatcctattgcgatgtttctaacgattgcaatgttagtagaatatttgggatatataaaagaaagccaatcaattaaaaaggcagtaagaatggctgtatcaaattgtagctttcgtacattcgatttatcaggaacagccagtcaaagcgagtcagcagaatatattatacagcaggcggtgaaatttaatgaagaatgagttgttgaaggaattatatagttttgatacggcgtgtttatcagatgcattagatagtttaaatattgatggtgggttaattggaataaaaccacaaaccagaaattgtgatttggtaggacgtgcgtttattgtaaattatcgtgaggcatcaactttagacagagagaaaaagcatcctgcaaattttattgatgatgtcccgtatggttatgttccagttttagccaatgatggaagaacggattgtacagtatggggggatattttgacagaaactgcgcaaagaaaaggaattccagggactataattgatgggtgttgccgtgatataaaatctataaaagaaaagaaatatgcaatgttttctaaaggagtgtatatgcaatctggtaaagggagaacagtaatgaccggtataggagaaagcactacaattggtggagttaatattgaccaaggagattatattcgaggcgatgaaaatggtgtagttgtaattccacagaaatatgtggaaaaagttattgaattatcgaagaatattttggttaaagaggatgctattaaaaaattggttgctaaaggcacaagacttgatagagctagaaaagaactcaattacagccatgcttgggagaaaatagaatgaatttttttgatcttcatgtacatgcgcaaccagatttgtataaacgacgttattctgttgaaacattggagggagagcttcgacaaactgatagttttgcagtttttaaaagtcacaccacttcaacgattcctttggttttagaaaattcaagagtatttggatctattgtattaaacccttatcaggggggagttcaattaccaacaatactgtcacaatatattttatctaataagccttttataatttggttaccaactatgacaggatacactcaaaaagctttaaaacaaaatttatataatagtatattgggaaagtatgaatttacgagtcgaatttctgataacggaaatttaaaaagagaagttagtgaaattttaaaatttgctagttatgtagatgtaccggtagcaactggacattcaagtaaggatgaggttttattattagtttctgaggctaaaaaatataatactcgaatcatcattacacatccattttatagattaactgatttttctatttttgagttaattgagttgagcaaacatcctaatatttattttgaatgtagcatattgatgaatttgattggtgatgaaaccataaaaaaagatgtagaattgattactgcagttggaacagacagagtgtttatatcatcagatctaggtcagattaataagctttcagtaactgaaggttaccagttgtataaaaataatataaaaaaatatgcagatattagtaatgaaagctgtgaagatatcttttttaatacaccaaaatcaatactttttggaagaaggttagaattatgaaaccattgatttttaatcccaaaattgcaaaagaaaagcctgatgatagtagtgactgtccattttgtcaagttcataagttgacaaatattcttgagcagaatggtacgatgatttggttggaaaataaatatcgaacgttagaggaaacttatcagacgattattattgaatctgatgatcattggggggagatttcaaattatacatatgactataaccggcagttgattcgatatgcaatggaaaaattctctagtatgcaatcgaagaaaagatttcgaagtgtagcaatgtttaaaaattttgggcctttatcaggtggcagtttgcgtcatcctcacttgcaaatagtaggatttgaatcgaaaaacatttatgaagcgttaagtttagaaagttttaaaggaattactatttgcacagaagatgttggtcgcgctgaaatcaatatatcaacgaaaccaacaatgggattttgtgagtttaatattattgctaatcagaatcaaatagataattttgcagatggtattaaaaatgttgtgatgtatctgcttaaagactactttttaggaaattgtcgttcttacaatctcttcttttttagaaacagtgataaagtaatgtgtaaagttgttcctcgttttgtagtgtcgccgtattatgttggatataaagtatcacaattgaatgatattaataggttagcagaagttaaacaggagtttttgactaaatttaggagttattatgacaaaaaataaatttttgataggtttttgtagttgtctgattgcgggagtaatgtttggagcacagtggccgattgctggaagtgctttacatgttatagacccgtactggtttactttaataagatatttgactgttgccgttgttttatcgataattttatttttgagagaaggaaaagatggttttattattgctaaaagtcaatttatcagtatttattttttagggacaatggctttttgtgcctataattttttagtgtttgcaggtcaaaaaatggcgggcactcagggaacaatattggcctccttattgatggctttaattccaatggtttctattttggttttatgggggtataaaaaggaatttccaggatttttaacgctttttttgattttagtttctcttgtaggtgtatttttagttgtaactaaagggaatttagccatttttcagcaagaaaagaatttgctaaaaccaattattttaatatttttaagtgtttttgcatgggtattttatacaataggtgtgagcaattttccagactggtcacctttaaaatatacgactttaagctgtttgtttgggaatattagttcgatttttgttataattatactaacaaaaatgaatatttctaatgctccatctttatctgatttacattctgttctaggccaactattttatatgagtattttttcaggtgttattggagttctaatgtggaacgttggtaataaatatcttggaccacaaaatggttcgttattcatgaatttagtgccgattgtaacatttttagtagaagtatttctaggttatcaaatttcagcaatagagatttttggagcttgtctaacgattgcagctattgttatcaataatttagctagaagaaaaatttaggatttttggggaggcagttaatgacgattacgatcaacttttcggagcaacttgtaaaaaatattcgttcattggataataattgtcatagtattttttcaccgcttagtgagcttttttgtagcttgcatgttttacttaatcctgagggccatggattgatgacggcatgggctatagaaacaaggaagcaaatggattgtaaaacattagctgaattgaagtatttttcaccactttataggaaatctgttcctagcttctttatggaagaaatgattactgaagattgttgtttagaggtacagttatctcatttgggaactagtttctttaataagaatgtagatgatttgattcaggagctaaaagaatttgacaaaactgaattggtgagagacttacagcataataaaaatcttgtatttttaaagctcttttctttcttgagggaatataatgatacctattttaaagaattagtatcgaattcaaatttgattaatattttaaatcataatgtcaaaaagcagatggacgatattgtagaaaaggggtttgtaaattttattagtacgattgattcaaatcaaatttattggaatactggttcaattaaaattcaaaccaaggaagatgaggtttatgaattagggtgtggtgaaaaactctattttattccgagttctgttacatggccacatgttaggattaacagacttagagagggtattaccattatttatgatattaattcacaacacataggcaacctttcacgacaagctatggctaataccttcaaaatattatctgatcctgtaagaattgatattttagttaatttaaatcaaggcaagaaaacaacaaaaggtttatcacagattttgagtgttagtgaacctactatttcacaccatttaacgcttctgaaagatgcgggactagttgaaaaaacaagagatggaaaacgtgttttttattataataccaacaaagtccttagtttgatacctaatttttataataatgcgaatcgttaactttcatccctcaacttaccaaccctcttgtggcaacaaatccaagctatgggagattggttcttgattgaagagtaagcaaaatccaattgtttttttgttctataaatcttaagaaacctaagaaaatatgctatactgaaagcaattagtttaaaaggaagtaagtaatggcaacgtttgtgaatagtatttcaggtgttttaattattttggtcatggttatagtaggctatgttttagctaaaaaaggttggtttgatgaccagactccctctttgattgcaaaattggttaccaaagtggctttaccatgttacatgatttatacgattgttggtcgtttcacggctgatgaattgttaaaaatgctgccacaattgcgttttcctgctctttcgatgattattttacttgcgattgccatggcggtagcgcagctatttgccgtagataaaaaacatcagggcttgtttgtctctatgttttttaattccaataccatttttgtgggattgcctatcaatcaagccctttttggtgataaaagcattccttacgttttggtttattacatgtgcaacacgactttcttttggacgattggaacttattttatccaaaaagatggacgtcattctgccacgattgactttcgtgacagtttacgaaaaattttctcaccaccgcttttaggttttattattggggtgattttggtgctattgaacatccaactgcctgccttcttacttagtgactttcaatatttgggcaaccttacgattccgctatcaatgatttttattgggatttcggtggcaaatgcagggctgtcacgtctgcgttttagtaaagacaatgttttggtccttttaggacgttttgttgtagctccgctgttaatgatggtgattgttagccacacgcaaatgccattactaatgaaacaagtctttatcatccaatcagccatgcctgtcatgacaaacgcccccgttgtcgcaaaactttacggagcagacgcagattacgcagccattatggtgaccgaatcaacccttctcaccatgctcatcgtcccaattttgatgtatttagtgaattatttatagtttaacgcttcctaataagggagtgttttttcaacacaaaaagcctagccaaaggctagactttaaggagattatgaaaaagatacattcacttagcttgggaggtgctaaagtgaacgttagctagcaaagccagctgtgaaagttttaggaatgactaaagtataaaaaggtagccttaaagaaatcttaaggaaaaaattattttctgttaaagacaggaaaaccagaaaattcaccataatctttgaaattaatgcctttattaactccaagacaagaaaaatgttataaaagtggagattttgtgtcattttagggaaattcagaaaaaaggatttcttcaaccttccaaagccaaatgaaagctcaagatatgttataataaagccatggaaaacaagaaaaaattacttttaattgacgggtcatccgttgcttatcgtgccttttttgcactgtataatcagattgatcgctttaaaaatcgtgctggtttgcataccaatgccatttacggttttcacctcatgctcaatcatttattagaaagagttcagccaacacacgttttggtggcttttgatgctggtaagacgactttccgtacagaaatgtacaaagattacaaggcaggtcgtgccaaaacgccagacgaattccgtgagcaattgccttacattcgtgaaatgcttagtgcgcttggcattactttctatgatttggaaaattatgaagctgatgacatcatcggaacattggataaattagctgaaaatgaggacgagtacgacgttaccattgtcagcggagataaagaccttattcaattagctgataacaacacaaccgtcgaaatttccaaaaaaggtgtggcagaatttgaagaattcaccccagcctacctcatggaaaaaatgggaatcacccctaaacaattcattgaccttaaagcgctcatgggggataaatcagataatatccctggcgttacaaaaattggcgaaaaaactggtcttaaattactcttagaatacggcagccttgaaggtgtttacgaaaacattgacggcatgaaaaaatctaagatgaaagaaaacttgattaatgataaagagcaagctttcttatctaagactttggcgactatcaatatcagtgcaccgattaccattggtttggacgacatcaactatcaaggaccagatttggacaaattagtaccattttacgatgaaatgggcttcaagcaatttaaagacaatctaggtgctccgaagaaacaagaaaaattcgacattagctacaccgaggtggatagcttgagtgcggatatgttcacggatgaccaatttttctattttgaaattttaggtgataattatcacgttgaaaatatcattggctttgcttggggaaatgacaaggcgatttatgcgtcaaccaatcttgaccttctcaaggacgatttgttcaaagcagcgctagctaaaccaatcaaaacttacgattttaaacgtagcaaagtcttgcttagtcatctgggtgttgatttaccagcgccagcatttgacagccgtttggcaaaatacctcctatcaacggttgatgacaatgaactgtcaactattgcacgactttacacggattatgttttagatagtgacgaagctgtttatggcaagggggttaagcgtgccgttcctgaaaaagcagtgctgctcagccatttagcacgtaagattgtggttttgaaccattctgagaaagtcatgctagacaagttgacagaacaccaacaagccagccttctctttgacatggagcaaccgttggcaaatgtccttgctaaaatggaaattgcaggtatttcggttaaaaaagcaacgcttcaagaaatggaagcttctaaccaggctgttatcgatgagttgacacaagaaatttacgatttggcgggcatggaatttaatatcaattcgccaaaacaattgggtgaattgctctttgacaagatgcaattgccaacaagctacacgaagaaaaccaagacagggtattcaacagcggtggatgtcttggaacgattggcgccaatctcgccaatcgtgtctaaaattttggaatatcgccaaattgccaaattgcaatcaacttatatcgttggtttgcaggatttcattttgcaggacggaaaaattcacacccgttacctacaagatttgacgcaaacaggtcgtttgtctagtgttgaccctaacttgcaaaacattccagtacgtttagaacaagggcgcttgattcgtaaagcatttgtcccagagacagaagatgaagtgcttttaagttctgactactcacaaatcgaattgcgtgttctagctcacatttcaaatgatgagcatttgattgcggctttccgtgaaggagcagacattcacacgtcaacagccatgcgtgtctttggcattgaaaaaacagaagatgtcacaccaaatgaccgtcgtaatgctaaggctgttaactttggtattgtttacggcatttcggattatgggcttgctaataacctcggcattccacgtaaagtggctaaacaatacattgaaacgtattttgaacgctacccaggcattaaaaattacatggagcgcgtggtacgtgatgccaaagacaaaggttatgtcgaaacgcttttccaccgtcgccgagagttgccagatattaattcacgtaatttcaatattcgtcaatttgcagaacgcacagctatcaactcaccaatccaaggtagcgcagctgacattctcaaaattgccatgattaaccttgacaaagccttagttgacggtcaattcaagacaaaaatgcttctacaagtacacgatgaaatcattcttcaagtacccaaaaatgaacttgaagccgttaaaacattggtcaaagaaaccatggaatcagcgattgacttatcagtacccctcattgcagacgaaaatgcaggacaaacatggtacgaagcaaaatagaaataaaaaaccgggagtgggacagaaatcggtaatttcgaagaaattcgattttcagcaagtcttaatttcttgttgctgacctaaaacggtctatccccagaccgttttactcccacccccgcaaggcttgaaagatttggggaatctttcaaggtgggaaataaagtcaagcgaagcttgatgtcaagtagggttgtaaaagctgatttatcagcgtattagaacccactcaactactgcgctttgcaattaatactataacatacaaagaattgagcacttttatacctcatttatacctcagctcagtttttgcattaactatgttatacttaagaaaaacgtcatacaaaggaggcagccagatgacaacatttcaaaatcctagtcaagatgtgattgctgattatttaaaaaatgccaaaaccattgctgttgttggtttatcacatcgtgaaaatagtccagcttatggtgtttcaaaaatcatgcaagaagctggctatacgattattcctgtcaatccaagattagcaggacagaaaattttaaacgagacagcttatgctagacttcaagatgttcctgtccacattgacattgttgatgttttcagacgaagtgaatttctaccagaagttgccaaagatttcattgaaacagatgccgacattttctgggcgcaacttggtctagaaagtcaagaagctgctgatattttacaagctgcaggacgtgataaaattgtcatgaacaaatgcatcaagattgaatatcaaggcttgtaagctaacaaaaaaactgagagtcgctttttgcggactctcagtttttatgatgtttctgccattgctggatagtgtcctcaatccagctcaattgactgctaacacgcgaaatggcgcggcttaggataaggtagtgaccataggcgcgctcaatatcttttgagcttgaaaaaagtaatttttctcgcattttaaaatgcgccagctgttctagcaaaatctgacgttcttcctctaataaggacaaaatccgtggattagattggtcgtggataaagaacatttttaaagagaaaaggtccttttgaataggcgcttcctcgaccttctcctctaaccagttagaaagaattgcttccccctcactcgttaattggtaatatttttccttagcattatcttcagaggtcgtttgtttgagccaattgtcattggacatacgttttaattcagggtaaatctgactatgagaagcacgccaaaattcgccaatctcattgtcaaattgtttcgtaatagcctgcccagtaatcggtgaagaatgcttgacaatccccaaaatgatatagggtaagagacgttctttaggcataagacctccttgtaatgaatagttgtttataactagtatagcaagaattcgccagattagataattattttttcaaacgtttgtaattatcatcaaagtatttcccattacgaatgtcgtctggtaagccttcgtatggtgcttcagagatgacatcttcgttattttgccccgcatcacccatataggtaatgtgagcaaattcaggaacgactaattttggataagtagcgtatttttcgcgagattcttccattaaatcaatgtgttcattttggaagcaaaccgtaatttcaggatgttcatgaacccaagcaggaaagaaaatcgtaccgttcaattttttctcattaggcacgaaatcaagggcaacgtcagtaccagttggttctgtccaagcaactttataaacaccttctgtgagcataacgatattagcttcttggtctttgacccaacgcccagcaaccataccgccatgaatacgataatcaacagtgtggtcatttttagcataccattcgtattcccaaccattatcgtaagtgtaaataaagtgagttcctaaaaaatcgtccaaagttttaaatgtttttgtcatctgttgatctccttttgattattttatgtcgttaacgacaaatatattataagactaaatctgagaaatagtcaagaaatttatgtcgatatttacaaaaatccaaaagtaacatttcaaaaatccgatttcatcaattttttactaaaaaatctctcagtaacttgaaattgtctgatttttgtaataaaataggtgagcgtgtcttgacatgtacttttttaaactatgttataattaacttagtaaattagataaggagagctataatggatgttcacactcaccaccgtcctttggatgcctatgagaatgtcattgagcatctcaaaaagaaacacatccgtataacggagactcgtaaagccattattgcttatattataaatagtcatgagcaccctagtgccgataaaatttatagagacctattgccagaacaccctaatatgagtttagcaacggtttataacaatatgaaagtattggttgatgaaggatttgttgccgagttaaaagtaacaaacgacaccacaacttactatgattttatgggacatcagcacattaacattgtttgtaaaaactgtggtgaaattgctgattttatggatgttgatgccattgatattggcaaagaagcttatgaacaaacaggttatcaaatcacaaaaattcaactgacagcttatggtatttgcccaaaatgccaagaaaaactaaaagcagcaggcaaatcttttatgacctatcacgaggataagtaaaggttcaagttggactttggtcataaacctgaacataaaaaaatcaccttagcaaggctagggtgatttgttatattattcagcattttctagtaaatcttcgtagaagaagaggttagctgttgtggtatatggtagtgtgtagaagtaaagcaaaccacaagtgaatactgttaaaatatgccaaccaatgaagctaaattgtaggcagaagaaacgccatctgtttcctttcattagttttgtactcttatcaataatgctacgaggaccttcataagtgccgttttggacatcatcataaaggatgtaagttgtcatgctgtatgagtagtttttcataatagcaagtacaaatcctgcaatcatcgcaatcaaaccaataatcacaataacccaccccgcagcagaatcatccacagctgcataagtaattccgatagcgaaaatgaatattccgacaccagcaatcaaagaccataagaagagaaatagccattttaaaagagctgtcaaaacgtatttcccaaataattcgtttgaaaagacaatcatgttgtctcctacttcgacgtggtcacgtttgagacgaatcacgtcaagtacagcataacttgctgacgcaagaaatagtgcagacagaattccaatgatacttggaactgattctgtgatgctaaattcagtaccgttgcttgttgtaaaaatcgcttgacgataagaaactgaaacggtaagaatcgctaaaacaatagaaacaataaatagttgatatttaccagagagtgttttaagaaattctctagcttttcgacgtgtttctgaagctttcataatggacctcctttatatcccttaaaaaataattacttccacgttttcaattatatcatattgtattagagatagcacactaaatcagagagacatgacaaaagatgtgatttttggtaaaatcgtaaaggttgtgctttgtatttttaataatacaaggcaagagattaatgagcttttcagtctcaaattctcagtctgattactgtttaatcatgacaatattaaaaatgcccacaactgttttttgtggtagctaggagaagaaaatgacagattatccgattaagtatcgcttaattaagaaagaaaaacacacaggtgcgcgtttgggtgaaattatcacaccacacggcacattcccaacgccaatgtttatgccggttgggacacaagcaacggttaaaacacaatcgccagaagagctcaaggaaatgggctcagggattatcctatcaaatacttatcacctttggttacgtccaggtgacgaattaatcgctcgtgctggtggacttcataaattcatgaattgggaccaagcgattttgactgatagtggtggtttccaagtgtattcattggctgatacacgtaacatcaccgaagaaggggtgacctttaaaaaccaccttaacggtgctaaaatgttcctttcaccagaaaaagccatttctattcaaaataatcttggctcggacatcatgatgagctttgatgaatgccctcaattctaccaaccgtatgattacgttaaaaaatcaatcgaacgtacaagtcgttgggctgagcgtggcttgaaagcacatcgtcgtccatatgaccaagggctttttggtatcgtgcaaggtgctggtttcaaagaccttcgtcgccaatcagctagtgacttggtcagcatggatttcccaggatattcaattggtggacttgccgttggagaatcacacaaagaaatgaatgaggtgcttgatttcacagtgccaatgttgccagaaaataaaccacgttaccttatgggcgttggtgcaccagatagtttgattgacggtgttatccgcggtgtggatatgtttgactgcgtgcttccaacacgtatcgctcgaaatggaacatgtatgacaagtgaagggcgtttggtggttaaaaatgcagcttacgcagaagatttcacaccacttgaccatgattgtgattgctatacttgccgcaattacacacgtgcttacattcgtcacttgcttaaagctgatgaaacctttgggcttcgtttgacaagctatcataacctttacttccttgtcaacttgatgaaaaaagttcgtcaagctatcatggatgacaatctcttggaattccgcgaagatttctttgaacgctacggctataacaagagtgaccgtaatttctaatatattctgaagcttgaaacagttgtttcaggcttttttgtttggattcccgaaaaagagttaactaataaaaataaataaagtagtaaactttgttagggggttgatgattatgataatttatggaattaatcttgatagtaaaggaagatgcaaacattatcatacaaagcaggacattgttgctctcaaatgtggtaagtgccaagattattttgcttgctatcaatgtcataatcagctacgaaatcacccttttgaatcagtttcggtaaaagctgcctcacctgttctttgtggtaattgccgccattttttaacttacgcggagtataaaaaaggggcttgtccatattgttatcatgactttaatccgaactgtcgcttacacgaaaccatttattttaaggagtaatttatgaaaaacgtgagagatttactttatattgcaatgatgacaactattcttgtcattttaggttttattccagccattccactgggttttatccctgttccaattgttttgcaaaatttgggaatcatgttagcaggtgtgctcttaggttggaaaaaagggtgcctgtcgattcttctgtttttccttttggggatgtttattccagctttttctggtagtaccttgtttgctgtttttgctggaccaacggctggttatgtggttgcttggttttttgtgccaattctaatcaatgtgattttgaaaatttttaaaacatcatcttttattaataatttaattgcaattttactaggcggtgttttatttgttgatgtgatgggagcaatttatctatctgtttatatacacacacctttgttgacttctcttttatcaaatcttgtatttatccccggagatacgattaaggcagttattgctagtgttgtagcctataaatttaatgatagactgatggtgtcgtaagagatagttttcaaaaaatgttataatgtgagtaagcattactagaggaggattctacgatgaaactcacaacacttggttgctggggagcttacccatataaagacggcggcacgacctcttatctcgttacgagtgaggacggttttcaattgcttatggattgcggaagccgtgctgtcacagaattagaaaaagaaatcagcccacttgatttggatgcggtgattatttcacattatcatcctgaccacgttgctgatttaggcgtgctacgccattatttccaactatatcccaaacatctctgggagcctaaaattttgccaatctacggacacaccgaagatgagcaagaatttgctaaactgactttagacggtgtttctcaagggaaagcttatgatgttaacggcgttgagaagatcggtccattcgacattacctttatcaaaaccgttcaccctgttccttgctatgcttttcgtattgtcgaacgtgcaacagggcaaacacttgttttcactggtgatacaggctattttgaaggcttggataaatttgctgcaggcgctgacctctttttggcagatgtttacctttatgcggggaatgaaaatcatccagcgcatttgacaaccaaagaagcagggcaaattgccaaggctgcaggtgtgacatcccttgtcttgacgcatacgccaccagttccaccacaaggcattgatgccgaaaatcaccttcaagtgcttaaagaagaagcagaaaattatgctgacggtgttcctgttgatttagctgagccacacaaatcatggcaacttggtgagctataatggctgaatttacacaagaggaaaaggaatatttcatgcgagaagcgctcaaggaagcgcaaaagtcgctagcaaaagaggaaatcccaattggctgtgttatcgtgaaaaacggtgatatcattggacgtggacacaatgcgcgtgaagaacgtcagaaagccattttgcatgctgaaatcatggcgattgatgatgccaatgaaaacgaaggcaattggcgtttgctagatagcaccctatttgtgaccattgagccttgcgtgatgtgtagcggagctattgggcttgcccgcattccgcaagtgatttatggggctgccaatcaaaaatttggcggtgcaggcagtctttatgatattctgacggacgttcgtctcaatcatcgagtggaagtggagactgggattttagagaccgagtgtgcagctatcatgcaagattttttccgtaaaaaccgtgaaaagaaaaaagcagccaagcaagctgccaaagaacagtcttagtttgcataatctagaaattatgatataatatttctcggagcaacatctgcgcgtgaagtgggtcaggggaggaatccagcagccctaagcgattgtaggtgtgtgctctttttgtatataaaactaaaaccctttgaaatcaatcgtttcagagggttattttttatttaagagactaaaaggggtgaaataggggcataacttaaaatattttaatcgtgtttaatcgtttagataaatcaagtgtcatctgtgtgatgatgtggttctaactgtaaaaatccgtgaaattttcatcacaaaatggttgtttcatgaaagttttcagtaacttggtaaacgctttatttaaatgagataatttagtaaaaatcattgaaaaatcatgcataaaagagtaatatagaagagaaatttaattttttgaggagtattgtaatgacacatattaaatttgattattcaaaacttttgggtcaattcgtcgaacaagaagaaatcgacttcatgcaaccgcaagtcaacgctgctgacgaatacttgcgcaaaggtacaggtccaggttctgacttccttggttggttagaccttcctgaaaactacgacaaagaagaatttgcgcgtatccaaaaagctgctgctaaaatccaatcagacagcgaagttcttgttgttatcggtatcggtggttcttaccttggagctcgtgcggctatcgccttcttgagcaaccacttctataaccttcaagcatctgcagaccgtaaaggtccacaaatcctttacgctggtaactcaatttcttcaacttaccttgcagaccttgttgaatacgttaaagataaagatttctcagtaaacgttatctctaaatctggtacaacaactgaaccagctatcgctttccgtgtattcaaagaacttttgattgaaaaatacggtcaagaagaagctaacaaacgtatctacgctacaactgataaagctaaaggtgctgttaaagttgaagctgttgctaacggttgggaaacatttgttgttccagataacgttggtggacgtttctcagtattgactgccgtaggtcttcttccaatcgctgccgctggtatcgacatcgaagctcttatgactggtgctaacgctgcacgtcaagaattgacttctgctgaaatttcagaaaacatcgcttatcaatacgctgctattcgtaacattctttaccgtaaaggttacatcactgaaatcttggctaactacgaaccatcacttcaatacttcggtgaatggtggaaacaattggctggtgaatcagaaggtaaacaccaaaaaggtatctacccaacatctgctaacttctcaactgaccttcactcacttggtcaattcatccaagaaggttaccgtaacatcttcgaaacagttgttcgtattgacaaaccacgtaaaaacgttgttatccctgaattgtcagaagaccttgacggtcttggataccttcaaggtaaagacgttgacttcgtaaacaaaaaagcaactgacggtgttcttcttgctcacactgacggtggtgttcctaacatgttcttgacacttcctcaacaagatgaattcactcttggttacacaatctacttcttcgagttggctatcggtctttcaggttaccttaacgctgttaacccattcaaccaaccaggtgtagaagcatacaagaaaaacatgtttgctcttcttggtaaaccaggatttgaagacttgtcagcagaattgaacgcacgtctttaattcatcattaacatagataaaaaagcttccgtaagggagcttttttgcgtgaaaaaattattcgaggtgaataaataaccaaatttctttccaaattttctgaatatttgttataatagtaaattatataataaaatttgaattagaaggatttgagtgtttagcaaggggagttttgaataactgtatctgagctaaaagggaaaactggttagtagtagatgttctgctttacttttctcgattgaaaggctctgtgagccgcttcaacgctctgggtatcttaaatatgactgcacaaaaaatgactgctcaagaaattatcgcatttatcggaaatgcggagaaaaaaacaaatgttaaagtgacatttgaaggtgaattagcagcagctgttccagaaagtgtcattaagcttggtaatgtactttttggtgattggaaagacattgagccacttttggcaaacttgactgaaaataaagattatgttgttgaacaagatggtcgtaattcagctgtgccattgcttgataaacgccatattaacgctcgtatcgaaccaggggctatcattcgtgaccaagtgacaatcgaagacaatgcggttgttatgatgggagctgtgattaatatcggtgctgaaatcggtgcaggaacaatgattgacatgggtgctgttcttggtggtcgtgccattgttggtaaaaatagccatatcggtgcaggtgccgttcttgcaggtgtaattgaaccagcttcagctgatccagttcgtatcggagacaacgttcttgtcggtgctaatgcggtcgttatcgaaggagttcaagtcggtaatggttctgttgttgctgcgggagctattgttaccaaagatgtccctgaaaatgttgttgtagcaggtgttccagcgcgtgtcattaaagaaattgatgccaaaacacaacaaaaaacagcactcgaagacgctttgcgtaatttgtaataaaggaagttgagataaaagatgctcagcttcattacttatgtagttgtagtaagcaaggcgcagtagtttggagaaactctgttgactttagtcaacttagagtttcccatgcacaattgattaggcacttcagtgccaatcaatcactgctgagtgggttctaatacgctgatgaatcagcttttacaacctttttgatgtcaagcttcacttgactctatttcccacctcgaaagattccccaaatctttcgagccatgcgggggtgagttaaaaaggttcggtgaacctttttaatcggggaataaaacttacggagtaagtgtcaaaaacggtctggggatagaccgttttaggtcagcaacaagaaattaagatttgctgagaaatcgaatttctttgaaattaccgattcgctttttaatttctaggctcatgaataaaatctccactggagattttatttgttccactcccttttaaaaaataaaggaaaaaatatgactttagatttagttaatatccgccgtgatttgcaccagattcctgaaattggtttggaagaatttaaaacacaagcttatcttttggagcgtattgcagaaattacggctggaaaagattttgtagagcaacgtacttggcgaactgggatccttgtctttttaaatggctcagctcctgaaaagacgattggttggcgaacagatattgacgctttgcctattgtagaagaaactgggttgccgtttgctagccagcatgagggtcgtatgcacgcttgcgggcatgacatgcatatgaccgttgcgcttggtttacttaatgaattggtgcaagtgcagccaaaaaataatgtactctttcttttccaaccagcagaggaaaatgaagctggtggcatgctcatgtatcaagataatgcctttggtgattggaaaccagatgaattttatgggcttcatgttcgccctgatttcaaggttggtgatattgcgactaatacctcaacattgtttgcaggaacttgcgaagtgttggtcacttttaaaggaaaaggggggcatgctgcttttccacatgaagcaaatgatgctttggttgctgcttcgtattttgttacgcaagtacagacaattgttagccgtaatgttgacccaattcaaggtggcgtggtgacttttggttctttccatgctggaacaactaacaatgtcattgctgagacagcgcgtttgcatggtaccattcgaacattgacgcaggatatgagcttgcatattcaaaaacgtttaacggaaattgccaaaggcgttgctgccagctttgacatggaagttgatgtcaatttgaaacaaggtggctatttgcctgtggagaataatccagagttggcacaagatttaatggcgttcttccgaaatcgagaggctgttaatttgattgattgcccgcctgcgatgactggagaagattttggttatcttttaaataaaatccctggtgtgatgttttggcttggcgttgatacgccttatgcgcttcatcacccacagatgagcccaaatgaagctgctttaccatttgcggttagtgagatttcagcttttctcaaagaaaaagcaaaatagtaataactaaaagaacttgagaattaagactcaagttcttttttaggcagcaaaaaagccgctattgggagttagcggcttaaaaagggaaggacatgatttctcaaccatgtccaggagatttatgaaaagggaataactcccaaaagagcctattcccagcggtttgggagaaccgctatttaggatgtttatagtatatcggagaaaccttaaagaaaccttaaagtaaattttgagatttttgctaagtaaaaaaccagttttgtgttatcataatagcatggaaaaatcacagttaagaacagctattttgactcagttaaaagagcatgacaaggcggagaaagctgctaaagataaggctttgttagaagatttagtcgcgtcagcagcttatcaaaaagcgcaaacaatcgcaacgtatttagcttttgattttgaatacgatacgcaattgttaatcaatcaagcccaaaaagatgggaaaaaaattcttgttcccaagacttattccaaaggaaaaatgattttttgcccttacgataaggataatttggtgaaaacaaggtttggtctgtgggagccagcggtagctaatgctgtggataagtcgcaaattgatgtcattcatgtcccaggcgtaggattcaatccggctggttttcgtatcggatatggcggcggttactatgaccgttatttagctgattatgacggacataccgttagcacgatttatgagtttcagaaagtagagtttcaggcagattgtcatgatatggctgtgaaggaggtttttagtagatgaaaaatgaaattaaaagaaatccaataacgatatttttactggttttaacaacacttgtctttttagcaatgcagattgtttattttggcaatgcgacctctgggcaagcgattcttaattttggtggcatgtatggtgcttatgttagcctagttccgacacaattgtggcgcttagtgacaccgatttttgtgcatattggttgggaacattttttctttaatgccttaacgctttattttgttgggcaaattgcagagcagatttgggggcatcataaatttttggcgctttatgtgttatcaggagtggttggaaatgcctttacccttttctttacgccaaatgtgattgcggcaggtgcttcaacatcgctatttggtgtctttgcagctattatggtagttggctattttggtagaaatcctttcttgaaagaattgggacgcaattaccagttgttgattttgattaatttactttttaatttatttaccccaggtgttgggattatcggacatattggcggtcttgttggtggtattttatgtgctatcttcttgccaacaattgtagaaaaagatatgtttaaaacttggcaacgttggcttgctgcaggtgcgtatgttattttaaatcttattttgattttagctgcgttgagataaaaataagccccttagaaattttctaaggggtttattttataagcatttatttagtttcttctttttttgaatcagcttctaattctttacctaaatcgataagatattgtttcatgctatctttgatttgagggtgttgaagggcatagtcaatagaagttttcataaagccaaatttgtcaccgacatcatagcggtcaccgttaaattggcgcgcaaaaacacgttgtgttttgttaagggtatcgatagcatctgtcaattgaatttcattaccagctccaggttcttgtgtttcaaggatgttgaagatttctggagtaagaagataacgaccgatgattgcaaggtcacttggtgcatcttcaggggctggtttttcaacaaatgtttcaacgctataaagtccgtcaatgccttcgccttgaggagcaataacaccgtaagatgatacttcttcgtgtggtacaggcataacagcgatagttgatgcgtgtgtggtttcgtagtcgttgatcagttgttttgtcaatggcacagctttatcgttattgatgtccataaggtcgtcaccaagcataacaacgaaaggttcattaccaacaaaagctttggcttgcagaacagcgtctcccaatccgcgtggatggctttgacggataaagtgaagattgatagctgttgtatcattcacaagtttgagaaggtcagttttccctttatgttccaaattgtattctaactcaaaatttgaatcgaagtggtcttcgattgaacgttttgatttcccagtaacaaccaaaatgtcttcgatacctgatttcaaggcttcttcgacgataaattgaatggttggtttatcaacaattggaagcatctctttagcgagtgctttagttgctggcaagaagcgtgttccaagaccagcagcgggaatgacggcttttctaacttttctcatatgagaactccttttcataaattaactatactggactaaattatactacaattctaatattagtgccattcattttcagaacggaaatcatttgacatcatacctaagatactttcacggacgtcgccaccttcatagatgactttgtagatagcgctagtgattggcatgtaaacatctaattctttagcaagttcataagcaactttagtggttgaaataccctcaataaccatacccatatttttttcgatatcttcgagtttttcaccacgtccaagtgcgtcgccagctcgccagttacgagaatgaacagatgttcctgtcacgataaggtcaccgacaccagaaagtccgctataagttagtggattagctcccattttaaccccaagacgagtgatttcagcaagtccacgtgtgataacagccgccttggcattatcaccgtatccaagtccgtgaagggcaccagcaccaacagcaatgatatttttaagagcaccagctgtttcaacaccgacaacatcagtattagtgtaaagtcggaaataattgttgctaaagagttcttgaacgtatttagcagcttcgtggtcttttgaagcagctgtaatcaatgtaatatcgcgaacaattgtttcctcagcgtggcttggtccagagacaacaacgatttcagaacgcaattcagcaggaatttcttcttctaaaatagtagaaagacgttcgtgtgtgccaggttcaagtcctttagaagcgtgcatgataacagctttgtggtcaagtgtttcagctacttgttttgcgaccaagcgtgttaccttggtcggtacaacaaataaaatagcatcaacgtctgtgagtgcttcttttaaatcgagtgtcgctttgatattttcagagattgtaatatctttaaagtagcgagtgtttgtgtgttttgtatttaattcttcaatttgatctgggatatttccccaaagacaaacgtcatgtccgttgtcatttaatacttgcgcaagagccgttccccatgaaccaggccctaagacagcaactttttgtcttgtcattttttctcctctctcaaacgagcaagatttcatttcccattatatcacaagagccccttgtttgtctttgtttattggaaaggtaatcagagaattatttgtgataaggggaaatttcacggtgtttagatgatgtttttgaaaaataacttgtggtataatgaaatgacgttactaggaaaggaagaaataagttgtgattgatttagaagagattttatccaaaatgaatcccaatcagaaaatcaactatgaccgtgtcatgcaacaaatggcaaaacggtggatgcaagaagagattcgaccacgtattcttgttcatgtttgctgcgcaccttgttcaacttataccttggaatatttgacgcaatatgctgatttgacggtttattttgccaactcaaacattcatcccaaggaagaatattaccgtagagcttatgtcgttcaaaaatttgtatcggattttaatgaaaaaacaggcaataacgttcaatttattgaagcgccttacgacccgtcggagtattttcaaaaagttcatggttttgaggaggaacctgagggtggcgagcgttgccgtgtttgttttgattaccgtttagataaggcagcaaagatggctgttgagcttggttttgattattttgccagtgccttgaccattagtccgcacaaaaattcacaggttattaatagcgtgggaatcgaagtccaaaaagtgtatgcaaccaagtacctaccaagcgatttcaagaaaaataatggctaccgccgttcagtagaaatgtgcgaggaatatgacatctatcgtcaatgttattgtggctgtgtttttgccgctaaaatgcagggcattgacttcacccaaatcaaaaaagaagccaaagaatttatggtcggaaaagacggcgaaaaagaattcccacacatccgctttaccttcgaaggaaaagaaatttaatacaagaaaagcagaattagtttcaagctagtcctgctttttgttaccgataaataatttttaaaagtatatatttatattttaaaactatgttaaaccgtgataaaatagggggtaattaagaagagggaagatagacttggagattggaaaataaatcggtatgaaaattaaaacatttacgagtaatttttatcatttaattttaagtcgttcaacgagaaatatagcggatagtttttatttgattgctctttctattggtttggtacaggtatatcaaatagacgctgcgaaattgtctttatttactttacttggtctgcttcctaatgtgacctcgattttctatggtccttttttaaatcgcataaagaatgacaaaaaatggttaatgattttccaaatatcgcaactagttgtaattgtgggaattattttgtatcttaactatcaatttgctgttctttggatgtatagtttgaatttcatttttaatttactgacaacgttattaaataccatgcaaatgaaaattactcctgaaaccttggataatgatagcgagctgattgataaatctgtcgatattcaatacaaaacgtcaaatgtgctagatattattagtaatttcatagcttcctctttgttggcttttatttcgtatctagtccttttgcaacttagtattccattttttataggagctatctattttatgtttcgagttaaacttgacaatagagcgacaagtcaattttctaaggagcatgagaaagaaaaacttcgtctattagaatcggtagaggcgtttagagagtcaaaatttgcttcgcttattattttcatcgaggcttttttgagtgggggtacggatttactgttgactcttgttcctttatatttactgcaggagaaaattcctattgggtatttaggtgttgtgcttgctgtgcaacgtggagcagatttgcttggagcacttttagcaccacgtatcagaatacgtcctagacattttttctgcattgactatatcatatctggactgtgcttgttatttgtattcattattccttatccattggtgaaattactgctattttttatcgcatttgttgtgattggagtatctggaaacatatttgaaaaaatgatttatgcggaatatgacaataataaagttgctttaatttacactgctagttctagtttatacgctatctttggtattttatttttgttaattccaagtttttatcaaaatataacggttttaggaatttcgattaatataatgacattcggtatcggtgtttatttattgataaaaagtggcgttttggtgaagggtgaattatcgtaggttttaggagaggttatgaaaaaatttaggtcatcgttttttctattatctgaagctgctgggattgtagctagtagcgtttatgggttaactctatcatttattgttcagcgttatgttgatagtcaatttttaaatagtttagttagcaatatcagcgtgacattaagcatgcttatggcattttttacaggttatattgtcgataagaaatcgccgtggaagttgattttgttatcagacttggttttgataccgctatttatcattcctatttttctttttgaagtttcaattccgttatttctgatttcaatagtcattattgacatgatttcgatagttgtttcagagttagatgagatttcaagacctgtttatctcagccttatcacaactaaagaaaaatccgtttcggttttacagagcattaatattgttgattcagcctttgctattgttggctatctttttgtctttttgacaatttcttttctcaaaattaacacttattttattatcgttagcatttgttacctttttagtgctatatttatttttcatttgccaaaggaaacgaaggaaaaacagcctctttctgaaacacaagaaagctttattttggcgttaagagaattattgcaagtgattgtagggctaaaacaagtaggtctttaccttgccaatcttctcttcatggtgaaaaatcagattgtcatgagccttttgatttttagaattggacagattgataagggatttactcatattcatatcattggtatcggaattctgcttagtgtagcaggtggtgcggtgcttaataagattctttatttagctaaggtatcggtaagaaaagttctttcaatgctcttaattgcttgtagtgggtattttacctatcttgttggtcatgcacaaactgttgagcatttcctattgtttggtttagcgataggagctatttttggaacaggtttaccgtgttttgggttgctttcagcagaaagaatgcttgttactccagataatcatcaaggaaaatcattatcgttgttacggacaagttcggttgttttaacacttagtctaatagcttgctttgctattgttgaaaagctctgccatttgacaacaatcttttttgacggtagtgttgttttagcaataatattggttttgctattttttgccctaccatttacggaattaaatagtgtaaggaaaaatagtaataagtaaactttctttgtttccaagcaaggaaagtttttttgatgaatagcttttatgttataatatgaagatgatttaatacagaaaaaaggagacaaaatgagtaaaattagaggatttgaattggtttcacaatttactgatgaaacattgctaccaaagcgagaaacagcacacgctgcaggttatgatttgaaagctgcggaaacaacagaaattgcagctggtgagattaaattagtgccaactggtgtcaaagcttacatgcaagctggtgaggtgctttatctttttgaccgttcttcaaatccgcgtaaaaaaggcttggttttgattaactcggtaggtgtcattgacggtgattattatggcaatcctgctaatgaaggtcacattttcgcacaaatgaaaaatatcactaatgagactgttgtggtcgaagctggcgaacgcattgttcaaggtgttttcatgcctttcttggttgctgacggtgacgaagcagacggtgttcgtacaggcggctttggttcaactgggaaataagtgatatttgcgagttgataggagatttttatgagagtaatatttgttcgacattctgaaccagactattccatgttagataggtgtgagaaccctgaaaaatatagtggttttggacgtgatttagcaccgttgaccgaacatggtcggcatttagcacgagaggttgctaaaaaagaggtatttcaatctgctgatgtcattatctcatcctcgataactcgcgcacttgaaacagcaacttatatcgcacgtgaaactggcttggatcttttagtcgagcctttctttcatgagtggcgacctgatttagataatttgaattacacaggagaagctgttgcaaaagcttatcggattttttgggaaaataatggaaaattagaagaaaattcttgttatcgatatgagacagcagaacaagttaagcaacgttttctagccgctttggaaaaatatcgtagatatgacacggttattattgtgacccacggtgtgctaatgcgccaatttgtttctcagaaagaaattgcttatggtgaaataataacagtagatttataagtaggaggtaatgggctatcgctaagaaaaaaacaacatttatttgtcaggagtgtggctatcattctccgaaatatttgggacgttgtccgaattgttcgtcttggacgtcttttgttgaagaagttgaggtgcaagaagtcaaaaatgcgcgtgttagtttgacgggtgaaaaaagcaaaccgactaagttaaaggatgttagctcgattcattattcacgcacaaagactggcatggatgaatttaaccgcgtgcttggtggcggtgtggtgccaggtagtttggtgcttatcggtggtgacccaggtatcggaaaatcaacgcttcttttgcaggtatctattcaacttgcagataagggaacggttctttacgtttctggggaagaatcagcagagcagattaaactacgtagtgagcgtctcggcgacattgacaatgaattttacctttatgctgaaacgaatatgcaagccattcgcgcacagattgagcaaattcagcctgatttcttgattattgactcgattcagaccattatgagccctgatatttctggggtccaagggtcggtatcacaagtacgtgaagtgactgcagagttgatgcaactggctaagacaaataatattgcaacctttatcgttggtcacgtgactaaggaagggcagcttgcaggaccgcgcatgcttgagcatatggtggatacggtgctttattttgaaggggaacgtcatcacaccttccgtattttacgtgctgtgaaaaatcgttttggttcaactaacgaaatcggcatttttgaaatgcaatctggtggtcttgttgaagtgcttaatccgagccaagttttcttagaagaacgtttggacggtgcaacggggtcagctatcgtggttaccgtggaaggtagccgtccaattttggcggaagtccaagctttggtaacgccgacagtctttggaaatgccaaacgcaccacgacaggactggattttaaccgtgttagccttattatggcggtgcttgaaaaacgttgtggacttttattgcaaaatcaagatgcttatttgaaatcggctggtggtgttaaacttgatgagccagcgattgatttggcagtagcggtagccattgcgtcaagttataaagaaaagccaacaaatccacaggaagccttcatcggtgaaattggtttgacaggcgaaattcgtcgtgtgacacgtattgagcaacgtatcaacgaagcagcaaaacttggttttaccaaagtttatgctcctaaaaactccctgtcaggtattgatattccagacaatattcaagtcattggtgtgacaactgtgggcgaagtcctcaaaaaagtttttgcgtaaaaagtgggagagtatttccgctttttttatttcctcatttaaagtcattttaggcgacaagaggtatgaaaaatgataatataagaaaaactttattagtcacgtagtcaaggaggagttttgatgtcttattttgaaaattttttgaaaactaaccaagcttatgctgatttgcatggtacagagcatttgccacagaagcccaaaacgcatgttgctattgtgacttgtatggattctcgtttacatgtggcacaggctttggggttagcgcttggtgatgctcatattttgcgaaatgctggcggtcgtgtgactgatgatattatccgttctttggtgatttctcagcaacaattggggacacgtgaaattgtagttcttcatcacacagattgtggggcacaaagttttacaaatgaagcttttgcagcgcagttagagcgtgatttgggtgttgatgtccatgataaagattttttaccgttttctgatgtggaagaaagtgtgcgtgaggacattgctattttgcgaaattctcccttaatcccagaggatgttgtgatttcgggagctgtttatgatgtggacacaggacgcatgagagaaatcaaataaagatgaattttcggatttttgttgacagcttttcgaggaagtaatataatttgtattagtatattggtacaaaaatgaaaatattgaggtgtacaagatgagaagttttgagattaaacaaaaactttggtcattagctggcaaatttgatattagagatgaaactggtcaacttgcctatcacgttcaaggatcatttttaaagtttttaaaggaattcacgatttctgacagtcaagggcagtttgttagtcatatcaaacatcattttagctttccttttcaacggtttacggtgacttttgtggacggtaaacagattacgattcaacaacgtttttcattgcttaaagctaaatatgatatttctgattttggtttggaagtggctggagacatttggaatatgaattttagtctgcttgaccaagggcgtgaagtggcaagtattcatcaagaatggttcaagatagcctcgacttaccatgttgatatttacgatgacagtcttgctgatttagtgatttcgctagtgattgctatcgactacgtcaaagcaatcgaatcatcaagtagctctgcctcaagctgattatagagttggggagtaatggtctgggaatggaccgtttgaggtcgataacaagaaactaagacttgctggaaatcaaatgttgaaagatacgtaggaaatcagctgttttcagctgattttttgttccaaggataaatattgtgctataatagaaatgattgaaattcaacaggagacgaaaatgcctaagaaaattcgcgtgcgttatgcaccaagtccaacaggacttttacacatcggaaatgcgcgtactgcgctctttaattatctttatgctcgtcaccatggtggtgattttgttatccgtatcgaagatactgaccgtaaacgtcatgtcgaagacggtgaacgttcacaattggaaaaccttaaatggttgggaatggattgggacgaaagcccacaaactcatgaaaaatatcgccaatcagaacgtttggacatttaccaaaaatacattgaccaattgttggcagaaggtaaagcttacaaatcatacgttactgaagaagaattagctgcagaacgtgaacgccaagaagctgctggtgaaacacctcgttatatcaacgaattccttggtatgtcagaagacgaaaaagctgcttatatcgcagaacgtgaagctaaaggaatcgttccaactgttcgtttggctgttaacgaatcaggcatttacaaatggcatgatatcgttaaaggcgacatcgaatttgaaggtggcaacatcggtggtgactgggttatccagaaaaaagatggttacccaacatacaacttcgccgttgttattgatgaccatttgatggaaatttctcatgttatccgtggggatgaccatatcgcaaacacaccaaaacaattgatggtttacgaagcacttggttgggaagcgccagaattcggtcacatgacattgattatcaactctgaaactggtaaaaaattgtcaaaacgtgatacaaatacccttcaatttatcgaagactaccgtaaaaaaggttacatgccagaagcagtctttaactttatcgctcttcttggttggaatcctggtggtgaagacgaaatcttctcacgtgaagaattaatcaaactctttgatgaaaatcgtttgagcaaatctccagctgcctttgaccaaaagaaaatggactggatgagcaacgaatacatcaagaatgctgattttgatacaatctttgcaatggcgaaaccattcttggaagaagctggtcgtttgactgacaaagctgaaaaattggttgaactttataaaccacaaatgaaatctgttgacgaaatcattccattgactgacttgttcttcgaagatttcccagaattgacagatgctgaaaaagaattcatggctggtgaaaccgttccaacagttcttgaagctttcaaagctaaacttgaagcgatgagtgacgaagatttcaaatcagaaaatatcttcccacaaatcaaagctgttcaaaaagaaactggtatcaaaggtaaaaacctctttatgccaattcgtatcgctgtttcaggtgaaatgcacggtccagaacttccagatactatctaccttcttggtcgtgaaaaatcaattgaacacatcgaaaatatgcttaacagcttgaaataatataataaaagagtctgggtcaaaagtacccagcttctttgtttatatagttattatttgcaagacgcagtagttgagtggattctaatgcgctgataaatcagcttttacaacccttttgacatcaagctgcgcttgacttcatttccaacctcaaaaggttccccaaaccttttgagccatgcgggggtgggagtaaaacagttcagtgaactgttttaggtcagcaacaagaaattaagacttgctgagaaatcgaatttcttcgaaattaccgattcgctttttagtttttatgctcatgaataaagtctccactggagactttatttgtcccactccctttttgcttaaaataatgaattttgagaaatatttaaatttgttgtaaaaaacgttttctttgataatgtctattctaaacgtgtgtcgttcttgttataataggcattgaatttgtttatttctaagttaagaggggttacatgaaaaaagattattcgagcttttttgttcctggtatcatcttagtgggagctgttttgcggattccatttacaacgataccaacggttttgagctatgttgcggacggtttgggcgtttcggtcaattcactagggattctaacgagtattccgttgattatgtttgctttttgttcgtctttggcaccgcgcttggcagataaatttgggcttgaaaaattattcaccatggttttgattgccatgtttatcggctcaagtatgcgcgtgattaatttaccaagtctttatctcggtactatgattattggggttagtattgccatgatgaacgttttactaccaagcgttatcttgactaatcaaccgttgcgtattgggcttttgacgactgtttatacgacagctatgggcttagcttcttcggtcgcttcatctgtggctgtgccaattgtcaagatgacatcatggaaagggctgattttacttcttagtttcttgattttgcttgctttggtggtttggtttccaaatacattccacaatcatgtgactgaaaaggatgaagaagcacacgttgggtcgctttggaaaaataagcgtgcgctggcattgcttgtttttggtggtttgcaatctcttcttttttacacaggaatgacttggttaccaacaatggcaagtcaagctggtgtatcaagcgaagcagcaggtatcttggcttctatttattcattgattagtttgccattttcattgacaattccaactttagccactaatttatcggctaagaatcgtaaaatcatgttagcgattgtttctgcttgtggtatcatcggaactggtatgctgttattccaatcaagcaactttgtctattggttgcttgttaatgttttaatcggaattgctgttagcgcccttttcccatatctgcttgtcgctttctcaatgaaatctcatacgccaagccaaaccgctcaattatctggtatggtacaatcaggaggttacttcctagcagcctttggaccaacactgtttggttatagctttgatctctttggttcatggacagtagcagccctttgcctattcatctgtacgattatcatgacagtagctttgttctacaccgaacgttttgaaaaaatactataatagatgaaaaacttctccttggattacctaaggagaagttttgtgtttattcaaaagggaggtcaatgtcaacttgaaagtagtgattaagttcactgctaatggctaattttcctttgtgaacctgaacaatttgtctagcgatttttaatcccataccatgacggcgaacaccagcaatgtcaaattcggtatcttcttgctgataaagattagcaagtttggaacatgacacgccaacgccgttatctctaatggtaatgcggaaagaatccctacagtcgtgtaggtaaatgctaatttgacagccattagggttatgcaaaaccgaattataaatcacattatgaatcacacgagaaatcagatttggctcaaatacaatgtttttttctgccaatccttcatcataatcaaaatcaaattgaaagttttcccagataccttggttaataatctgaataataatctctttgaaaaatggaacgagacgaatcgtttctttttttagttgaaattgactatctgttaatcttgcaaaaatattgaggtcatttaagatattttgaatgtaatacccttcaaccaaaatcggttcaatatggtgtcttatttcggtatcattagatttacttttagcaagcgaggcatttgacacgataacagatagtggtgttttgatgtcatgagcaataccagaaatccattcttctttgaacgttcgactgtcttttaattctttatcagcttggttaatggcattgattaatttttgaaaatcatcttgtttttcaagattagtatctaaaccttgtggtaagcgtgtgatagcttgggtgacaggctgcagttttttattgatgaaatgggtgctataaaaatacaagcctatgaaatagataatatttgtcgcaatgataccaaaaatgagccaacagatataagtgatataagatttttcgtagtaattagacggaaatttgaaaatgcggtctttagggaagccgataataatcagattattgtcaacaatatgtgtaaaaacagggtaatcatctaaatagaaacggctgaattgagcaacatcagctaaatcatagtgttcttttaacgttttaggggttctataatgaaatacctgattcccattttcagaatcaatgaccatgacccaaaggttattttgtttagcgatttttttgccttcattactcaaagtgacagaattatcgaaagagaaattttgtgcaatctggtttatggtatctgttgcgcttgtttcttgagtttgctgatagccaagaatcacaaaaacaataatatccagtaaaagtaatatgacaaacgaacttataaaacgcttgatgaaacgttttatggtattaaatgcaaacataaatcattcctataatacaaacttatagcctaaacctttaacggtaacaatatgctggggtttagaaggattattttcgattttttcacggatattgcgaatatgcaccataagtgatttttcgtatccaaaattttcgcctttccaaacactatcgcaaatggattctgttgagacaatataatttttattggcgtataattttttgagaatttgaatctcggtaggagttagtgaaagttcgacatttcccttctgaacaagagcattcgttaaatgtattgtacagttgtccaattcaatcagttcggtatcgcatttgtaagcacgtcttagcaaggtcataatacgataaatgagtacttggggcaaaaatggcttagtaacgtagtcatctccgccagcttttaaaccattaatttcatcctcaggattgtttttagccgttaaaaataatataggaatatcagagtgttttctaacgtctttggctaatgaatagccttctccgtcaggaagcatgacatctaaaatgattaaatcgatattattcatcgacagcaaatcaacgctgttgctgatactgtaagcacagctaatatgttgaaaacctgcatttttcaacacttctttaatagaagtattgagcgagtagtcatcatcaacaattaaaatcctcttctttagaagtgatgcttcaaagtccatttttcctctccaatcccatatagttgtacccattatatcaaattcagccttattctttgcagtaatactaaaatcttaaggtaaaatttaggattactttactttttcttaaacagaactgcctaaaatgatgtcaataagagaaagtttgaaaaggagaaatcaaatggagactgttatccaattaacaaatctgaaaaaaacttatggaaatgttacgacagttgatttggattatattactgtgcgaaaaggcgagatttatggctttttaggtccaaatggtgctggaaaaacaacaacgttgaaaatgattttgtccctacttaaaccaacttcagggacgattgaaatttttgatgaagaaataacgaaaaatttggactatctcaatcaaatcggctcaacgattgaagaaccgtcatattatcctaatttaacagggtatgaaaacctgcttgtttttcaaaaaatgcttggttttgatcgtcaaaatattccagaaatcctcaaattggtaggcttggcagaagagaaaaatcgtaagaagctagtcaaagattattctttaggcatgaaacaacgtttggcgttggcatttgctctggttaaaaagccgaagattctcttactagatgaaccaacaaacggtttagaccctgcaggaatccatgaaattcgtgagttgattgttaaactagccaaggaagaaggattgacgattttcatttcaagtcatatcttaagcgagattgaacatattgctgatagagttgggattattaaccatgggcgtttagtttatgaaggtgaaattgagaaaataaaatccaatacgtgggttgaaattggtggtaattttagtcagaaaaacgttgccaagaccatttacgagaaaacaaatgccacgattttaagcgtgacggattcgatgttgacattagcagaccttgataatcaaagtatttccgaagttgttgttgcacttgttaaagccgactattctatttttcgtgtagaacgccaaaaagaaactttggaagatatcttcttagctttaaccaaggaggactgagatgctgaaagccatacaaattgagttattaaagagtaagagaacaaagtcgtttataattgctactttaatcgtcaccatgggacttttgtggaaaattgctgcttttctagggcacacaaatggtgtagaagtattttttgacaatcaagatattcatgtttttgttttgccgattgcgattagtatctttatttcacgcattatcagtaatgaaaaagaagggcgaacgtttaaattacaagccagcaatgggcgaggaataaccgagatttttcatcaaaaattttatttttctatcgtatttttcggtttaatggctttgctttatacagctggtatctcgctttatctaatcttggcagaagggcaagaagtacctatttatatttttgggatacaagtcctatcgttgttgctagttagttttgttcaaatttgtatttacatgactttggcaatgattttggagaagcaaggtcttgttttagccatgggatttataggtgcatttctagggtttatttttcaagggaaaactagtcaattttggacgtttttaattccttgggatgggacaggttttctttccatttataagtttggttatgatgttgaaacaaatacgatttttcacactccagaaaatcatttagcattgagaatctgcatttacgcagtttatgcattgatatggtatggaattgctagacacaatataacatcaaaaggagaagtatcatgatagcatatatttcagcagaatggcaaaaacttaataaaaagcaacttttattagtaggttttcttttgtttgcagtttccagttttattggtttgagcacttattatcttaatcgctctatttttattgagggaacacaatctttagtaatgtgggggcaattaacattatttaatagtcaaattttctttcctgctttgttagccatttttatgggaattagtctgatgccagaatttgaacgaacaacgttagaaatgctacgtgccaataacgtatcactgtcaaaacttttgttgagcaaactggctagcttgattgttatcttagccccgttgcaactattattagtcatcacatggtttgtcgctctgtcaatcgaccatattaacgttacaaatgaaatagtagttcatctcaaatgggcgtttctatcattatttggagctgtaaccattcttagtgtgcaggcatttatattatcaaaaactcgtaatttttctaaatccgtaggtttagctgccatgggagccataggaggaatcatcttactttttattaatgaaaatctgaataaatattatccatactccttggttatgattgccttgaggagtcgagcgctagaagattttcaattaacagacttaatcgtctttatagtggtgaatattatttatagctttgttttttataaactaacttgcaaagaattggcaaggtagagaaatcaaaaaaagatgacatttaaacaaagagtgaacaagaagctgtccataaaacatggatggctttttgaaatgtagaatgatttttttgcataaaatcgctcattttctgtatatatactgtatatttgttataaaatcgtaaaaatttcgctttttttgaaaaaatattcaaaaaagtgttgacaggattgtttttgatatgtataattatacacataaagttgataaaaacacaaaaataagaaaagagagtattcctatgtcaaaagaaaaagttatccttgcttactcaggtggtcttgatacttcagttgccattacttggctcatgaaagattatgatgttgttgctgtttgtatggacgtcggcgaaggtaaagaccttgattttattcatgataaagctcttaaagtcggtgcggttgaatcttacgttcttgacgttaaagatgaatttgctgaagaatatgtgcttccagcacttcaagctcacgcttactacgaacaaaaatacccattggtatcagcgcttagccgtccagtcatttctaaaaaattggttgaaattgctcataaaactggtgcgactactattgctcacggatgtactggtaaaggtaatgaccaagttcgttttgaagtggcaatcgctgcgcttgatccagacttgaaagttattgctccagttcgtgaatggaaatggtctcgtgaagaagaaattgaatacgctaaagcaaacggtgtgccagttcctgctgaccttgacaatccatattcagttgaccaaaacctttgggggcgtgctaatgaatgtggtgtccttgaaaatccatggaatcaagcaccagaggatgcttttggtatcacaacttctccagaagaagctccagatacaccagaatttgttgatattgaatttaaagaaggaaaaccagttgcacttaacggcgaagagctaaaattggcagaccttatccaaaaattaaacacaatcgctggtaaacacggtgttggacgtattgaccacgttgaaaaccgtttggttggtatcaaatcacgtgaaatttacgaatgcccaggtgctatcacacttttgacagctcacaaagaaatcgaagacatcacattggtacgtgaagtttctcatttcaaaccaattcttgaaaatgaattgtcaaaccttatctacaatgctttgtggtttagccctgcgacagaagctatcattgcttacatcaaagaaacacaaaaagtggttaacggtactgctaaagtgaaactttacaaaggtcatgctcaagttgtggctcgtaaatcaccaaactcactttacgacgaaaacttggcaacttacacatcagctgacagctttgaccaagatgcagccgtaggcttcatcaaactttggggactaccaacccaagttaattcacaagtaaacaataaataattaacagaaaacaaattaaaggagctgctttagcagcgacacagccctatacttttcgctgtggtaaaaagacaatcagcaaaaaaagctgattgcctgagaaattttgagacttaggctcaaaatttagccatggaattccttggattccttcaacagttcactggactatggaacctggcgttcctaccacttaagaaaagtataaaaagaaaagatggtttctaaggcgtaactttgatatcaatcaaggaattgagccgtagataaaaatcttaataagtaagaaaagaattggtgagaaattttcaaggctaatcaaggaagaatggcgcaggcagtacttagggtacggcaagccatgatgacaacgattagcaccgaaaatttccaccaagcttcagataaaaggggacagggagccccatctgagactcttttcttataacttacctatctcgttaatgtcaacagagagtggcatcgagcttaaataatgatatcctgtgagaatcatttaagaccaacgccccgtgaggcaacaccctataagtcctaggtcgctccttggacttatttattaattaaacaaataagaaaagagaaaggctttgaacgccacgtgttttggtggttcattgtatcattgttatggcaacagaaaatcataaattatggggcgggcgttttgaagctggtcttgaaaaatgggttgaagaatttggagcatcgatttcttttgaccaaaaaatggcagaatttgatttgaaaggctcaattgctcacgtgaccatgcttggtgaaacaggtattattgcaaaagacgaagctgcgcaaatcaaagaaggtcttgaagaattgcttgcagaatacaaggctggaaaaattgaatttgacgtgtcaaacgaagatattcacatgaatatggaaagtctcttgactgctaaaatcggtcctgtggctggaaaattgcatacggcgcgttcacgtaatgaccaagtggcaactgatatgcacttgtacttaaaagctaagcttgatgaagtgattgaaaagcttggcaatttgcgtcaaacgttggcggacttggctgatgagcatgtctatactatcatgccaggttatacacatttgcaacacgcacagccgatttcatttgggcatcacttaatggcgtattataatatgtttacgcgtgatagtgaacgttttgaatttaatgtgaaacatacggatatatcaccgcttggtgcggctgctcttgctggaacaacttttccaattgaccgtgagatgacagcggagcttatgggctttgccaaaccttacagcaattcacttgatgcagtgtctgaccgtgattttatcttggaatttttggcaaatagttcgattttgatgatgcatatgagccgtatttgtgaagaaatcatcagctggtgctcaaatgaatttaagtttgtgacgctttcagatacgttctcaacaggttcatcaatcatgccgcaaaagaaaaatcctgatatggcagaattgattcgcggaaaatctggtcgtgtttacggtaatctttttggacttttgacggttatgaaatctttgcctttggcttacaataaagatttgcaagaagataaagaaggcatgtttgatacggttgaaaccattacggtggctattgatattttggctggtatgcttaaaaccatgacggtcaataaagagcatatggctgaatcaactgaaaaagatttttcaaatgcaactgaattggctgattatctcgcaagcaaagggcttccattccgtcaagctcacgaaatcgttggtaaattagtattagaatgtactaaagctggctattatttgcaagacgtgccgtttgaacgttaccaagaaatttctgatttgattgatgaggacatttatgaaactcttaaatcacacaccgctgttgagcgtcgccattctcttggtgggactggatttgaccaagtcaaatggcaaattaaagaagccaaaaacagtctaaaagcgactcattaacaattttttctacttcctaaagcattttccaataaaatatttaaagatattaagcccaaaatccttagaggttagggctttttaaatttttatggtataataaaaataatttagaatggagtcgtacgttgaagaaaacctatcgtgtcaaaagtgacaaagattttcaggcaatttttagcaagggaacaagtgttgccaatcgaaaatttgtcgtctatcaattagaaaaaaatcaaggccactatcgtgtagggctttctgtaagcaaaaaacttggtaatgctgttacccgaaatagcatcaagcgaaaaattcgacatgttgtcatggaattgtcaccaaatttacgacatcatgattttgttatcattgctcgtaaaggtgtcgaggaacttgattatcatgaagtgaagaaaaatttactccatgttttaaaacttgccaatttatatcaggaaggtctagatagtgaaaagaaagattaaattattagggttaagtagtcttactttaatacttttggctgcttgtggtcgcagcgaagtaaccgcttcatcaactaatggctgggatcaaattgtttatttctttgccaaagctattcagtggctatcgattaatggtcgaatcggagttgggattgttctctttaccattattattcgagcaatcatgatgccactttacaatatgcaaatcaaatcagggcaaaaaatgcaagacttgcagccagagcttaaaaagttgcaagaaaagtatcctggtcgtgatacagacagccgcatgaagttgacagaggaaagccaagcgctttacaaggaatacggtgttaatccatatgcgacgatgctcccactagtcgttcaattgccgattttgatggctttgtatcaagccttaacacgtgttgcctttttgaaaacaggtacatttttatggattgaattatcaaaaccagacccatattttattttgcctgttttagccgctttgttcacattcctttcatcttggttaacaaacaaagcagcgcgtgagaaaaatattgccatgacggtgatgacttatgtgatgccaattatgattttctttatgagtttcagattggcttcaggggttgtgctttattggtcagtttcttatgcttttcaggtattccaaattcttttgttgaataatcctttcaaaatcattgccaaacgattggaagaggaacaagctgaaaaagaacgtgcggctaagattcgtcgtgctaagaagaaagcgcaaaagagaagaaagtaagaggaagaaagtatggtaatattcacaggtagaactgttgaagatgctattgaaaaaggcttgaaagagttgcatttgtcacgccttaaagcccacattaaagtggtttctcgtgaaaaaaaagggttcttaggttttggtaaaaagcctgctcaggttgatatcgaagggattaatgaagtgacggctcaccgagctaaccaaaaagtggttaagggtgtgccagaggaagttaatcaaaaaaatgaacctgtatcatcaaaatttgaagatacaatggaacttcgaaaagttgccagcattattaagaaaatggaagagcgtggcgaagtcattgacgattcagttaaagaagatattgtcatgcacaagaaaaaaacacaaaccattcttgaagaagctgggcatacagaggttttagaagcgcttgaaaaggctgaagaaccagttgaagaagatgttaaggttgacgaaagcccagaagtggctaaaactgagcaatcttttgaagaatttgttgctagtgaatttccagctcaacgtgaattgagtaaagacatcgaaaaagctacggaagaagttgcagaatatgtcaaaaaaatcatctatgaaatggacattgatgcaacggttgaaactagccacaatcgccgtcaaatcaatttgcaaattgaaacgccagaagctggtcgtgttattggttatcacggaaaagttttgaaatctcttcaattactttcacaaaatttcttacatgaccgttattcaaagaatttttctgtcattttgaatgttcatgattatgtggaacaccgcacagagacattgattgaatttactcgcaaagcagccaatcgtgttctcgaaactggtaaagattatgtcatggacccaatgagcaatagcgagcgaaaaattgttcacaaaacaatcacaagcattgatggtgtggatagttattcagaaggtaacgatccaaatcgctacgttgttgtgacagctgttcaataaatttccagagccgttaaggctctttttttaccgcttagttgctttttttcactgcttaccgtaagatgcctcttttgttggggcttttttgctataatggctacaaaagggagggaaaggttatgttgattagaacgaagaatcttacgaaaacatttggtgaccaattggtgattgaccatttgaatttggaagttgaagagggaatgttattagcctatattggcacaaatggtgctgggaaatctacgacaatgcggatgttgacggggcttttggcaccgacatctggtgagattgaattagcgccagatttgaaaattgggatggtttttcaagaaagtgtcttggacgctgaattgactgttttggataatttgaggagtcgttcggcactttatcgtaaccgtaataaggattggatgggtaaattgattcgtttgacggggattgatgcttttcttaatcagacatatggaaccttgtcaggtgggcaacgtcgccgcgttgatattgttcgtgcacttttaaataagcctaatttgcttttcttggacgagccaacaacagggcttgatattcagacacgtgaagctatttggcaattattgcgccagttgcaagcagaagaaaatttaacaatctttttgacaacgcattaccttgaagaagctgaaaatgcggatatggcttatatcattgaccatggcaaggttttggcaaaagggtcagccaaggaattgaaagaaacttatacacagccacatttattaatcaaaacacagcaagtgaaagcttttcaggatactgattattatctacaagcggatgattgtttgaaaattgaggttaacagtgtgtcagaagctcttgcgattttgtcggacaagcgagccgtgattgaggattttgattacaaaaaggctaatatcaacgatgtctttttaagcattacgggaagggagatggcgtaaatggttgcgatgacaaaacgaaatttgaaactttatttttccaataaaatgagtgtctttttctcactgttgggagctttgattgcttttggtttatacattattttcttgcaaaaaaatatgcaggattcttggtctggaaccccacatttggaagaaattttagataattgggtgattggtggcaccttggcgataacgagcattacgactacttggacaggaattgttcgcttagttcatgaccgagaaaatcacaagctagaagattttctgttgactgatacgtcacgttttaaagtctatctaggttatttaatgtcagcgagcgtcattggctttaccatgcaagcatttatgtttgtcgtgatgaaactctactttcattggcaagataatattagcctttctggctcacatttaccacaaatacttggtataatggttttagggtcattgctcggagcaagtcttgctttgttgattttacaatttgtcaaatcgatagagtctagtgaggctttatcaaccattgttgggacagtttcaggttttctcgtgggcgtttatatgccacttggaacattaccgaatattgcacaaattgtggttaaaataacgccagcagcttacgtcgctgcggcttatcgtcagacgttgattaaccaagattatctgggaaaatcagaaaaagtgtacttaggcattggcttaaaattaaaagaattaacaacggtcaatcaagaattgctaatcatcagcggtgtgctagttattagccttggcattctaggaatgatgttaatcgtcaaggaaaaacgtccagtgattagtggataagtagaaaatgaggggagagagttgtgcattatcaatttgaggaagataagcagttaccaaaagatgttattgaagtcttagttaaaagctgtcagtttgacaattccgtacaaaaagttctggattatcttgctcaatttgagcaaaaagagccaacagttttgccgataaaaacggtggatcgtattgaaatgttgcgtgtggcagatttgattctcgttgatgttgatggctctgcccttattttggaaacgacgcagggacgattgttgactaacgaccgcttgtataaatttcgccaacgcttagcaaacccagattttgtccaagtttctaagcatgctttgattaatatcaatcatctgaaagcacttgaaaatagcttttcaggcaatatgttagcgatattgacaggaaaaatcaaaacagatgttagtcggcgttatttgtcagagttggaaaaacgcttgggattgtgaggtgacattgatgaattatgttaaacgagtgattatctatttcttaatgggagtaggttttgggagtttggtttacttgttctttttgtggcagagtggtgctgagacgcagacggttcagcatattgcaaatgtggtgttcattagtggattgattggtttggttagtatgatttttgaagtggaagccattcctatcgcatgggaaattctgattcatttttgcttggtttatgggctatatagttggcttgagaaacttaacggcattgtctggtcatggcatcttttaggcgaatttttccttacttatctagtcatctggtttgtcatctatatcagtttcaataaccgcgtgaaaaatattaaccaaagattacgtgagaagaatgggtaaagtaattataaaaaattcaagagaacaaaaatttgttctcttttgctatatttaacattaaaatattttgaaaatagtggtacaaatgatatacttatttaaagtatatatattttaagcgtttatggttttaggagatggaacattatgaaaaagtttattgtagttgtgggttgcacatttggtttgttgttttcattgcttggggctaatggttatttagtggcttctgatgttgatgctaatacggtatcacataaaactggcaactataccattgataaaattcttagcagctatgagggcgaagaatttttcacaaaagattacgttgatgagatgtttaacaactggagtattgatgaaaatactaaagtcatcgctgatgaggaaggtggtctattttattctttaactgataaccatgcggttctaaagacatacgatactgacagcggtcaagtcgtggaagaactaagcttagattcccctagagcaacaacggtcggagagctaaaagaagccttgtacgaagctttagaagaatgataacgaatgctccagttatatgctggggtatttttaaactataaaagctctttgggttcatcttttaaaagagagacatcgaaataaaaaccaagtagtccttgacagcttcctattcttattataaaatagtatggtatgtttagtaactgatcaaatatagccggctaaacgaatacgaaaatctatgaggaggtattcatcgtgaaacgtacttatcaaccaagtaaaatccgtcgtcaacgtaaacacggattccgtcaccgtatgtcaactaaaaacggacgtcgcgtgcttgctgctcgccgtcgtaaaggacgtaaagttttatctgcttaattgatagaatacaaaaagtcaccgtcagtgctcgagtctgacggtttttttaattttcttgaaatcagtcttactttttgggtgttcatgaaaaaatatgatataataagcaatatattctgtaagcgtatacacaaacaaagactatcattttcagttattaaaaacggagttttatttgagttctgttttgttagcaattgaaaatttttgcaattgatatttgacaattaaaacctatcatgattagtaacgtgataggttttttattaggaatagagctatgcgaatatggaataagactaaaaaaacttaacatttgctaatattcttgtgttaattttggtacaataaaggtaattattgagaggaggtgtcacggtggcaaattccattttagaaacaatgcagggtattgaagccgaagcaaagcaagttttggcggattatgatgcaaaggttcaaggattacgttcgcaatttacacaagaattggaacgtatcgaaacggattgtgaccagaaaactcaaattgaagttgaggggctttcaaaagaacttgcggagaaaactgctcagttgaaagaaaacttgacgacaaccattgcgaaaaatgacagcaatgtcaggtcggttttgatgacgagaaaagacggtctggttcagcaaatcgtggacagggtggtagaaaagtatggcaattagtcaaatgaagaagatttctttaatcttctcaaaagaaacgcttgacgctctgttgcttattcttcagcaatcacaagtggttcaggtacgtgatatcacacagatgacggattggcaagaggcttttgaaactgctcaagtcaatctcccacagattcatttgcaagagtctgataaggagttgactggagaagaagtgctctcgcatttggcaaaaagacagcaatctttggaaacaactattggaaaattgcaacattttattccaaaagaaggaacgatacaatcgttacgaaaagctgatttttccatgtcttttgctgaattagaagcgtttggtcgtgataattccgctgatgttttaatcaatcgagtgaatgataaaatcaagcagaatcgtaatttggagcgacgaattgcagaacatcaagccgaaatcaatcgtttaatgagctggcgctcgcttgaggttacgccaaaagaattgagccattttgattttgttcatgcggttgttggaacgattcctaaaacagatgacgatgctttatatcataatcttaaagctaattcagccttggaagttcaagatgtctttagttcagaattagagtatggtgtgattgtttttcaaagtggcaaagtgatgtcatcacttgatgactatggctttaagccttttgattatgacaaaaacatactgccagcgcaagctatttctcaaatgcaagatgaagtggctacttggacggctgaaaagctggaagttgagggtgaactgaaggtttcgcaacgagagcttcaagagttgaaagttcagacagattatgtcttagggctttatgcgcgtcaggaagctaagaaaaaattggctagtaccaagcatttggtggctttggaaggctgggcagaagcagagcaaattgaccgtctgaagtcagatattcaggcacaatttggcgatggtgtttttattcaagagttggatgtggttgaagatgattgggaaaatgttcctatcaagcttaaaaatcacccattggtagaaccttttgaattagtgacagaaatgtacgctttgccaaaatattatgagaaagacccgacaccaattttgatgccattttattttactttctttggaatgatggtagcggatttgggttatggtttgttcttattcttagcgacgtttttggcgttgaaactgttcaatttacctaaaggaacaagacgtttcttgaaattctttaatattttagcagttgcggtatccttgtggggaattgtttatggttctttctttggctacacaatgccaatcgttcttttgtcaacgacgactgatgtgatgactattttgcttttatcagttgcatttggttttgtgacagtggttgttgggctacttttgggtggtttgcaaaaactgcggctaaaagattatgcggaaagttacaattctggctttgcttggtgtttgatattgattggtattttactgattgtgttaggggcaatgcttcctcatctatcagtattgacaacaattggtgcggtacttgccattgcaaatgcgattggtatagtgattgtctcgattattcaagcaaagagtttggtcggcttaggaagcggtctttacaatctctacaatattagtggttatgtgggagacttggtcagctttacgcgtttgatggcgcttggtttgtcaggggcaagcattggctctgctttcaacttgattgttgaaattttcccaccagtagcacgttttactattggtattgtcatctttatacttctgcacgctattaatattttcttatcattgttatcaggctatgtgcatggggcacgtctgatgtttgttgaattttttggaaaattctatgaaggtggcggaaaacctttccgacctttaaaatcatctgaaaaatacgttaaagttactataaaatctcaatcggaggaaaactaaaatggaacaattagctacttacttctcagcacatggtggtgcatttttcggagctcttggtgttgctttagccgttgctcttagtggtatgggctctgcttatggtgttggtaaagctggtcaagcagcggcagctttgttgaaagaacaacctgaaaaatttgcgtcagccttgattcttcaactattgccaggtacacaaggactttacggattcgttatcggaattttgatttggttgcaattatctccagacctttctgtggaaaaaggtgtggcatatttctttgttgcccttcctgttgcgattgtgggttatttctcagctaaacatcaaggaaatgtggctgttgctggtatgcaaatcttggcaaaacgtcctgaagaattcatgaaaggggctatccttgctgccatggtagaaacttatgccatccttgctttcgttgtttctttccttttgacacttcgtgtaggataatgagaagcaattttaatgactattttcctaatataaccgttaggatattatcttagaaagaggtgttcaagtgagtgacacaaatgcactaaaacaatcaattattgaacaggctcatcaagaaggcaaattacgtttggctgctgctgaagataaattgacaacagaatttgaggcaaacaaagcacgtttattgcgtgaaaaagaagcagaacgtcaaagtcaactcaaagatattaatcaacaatttcaaattgaagcgcagcaaattcgtaaccaagaacgtcaatcaactttggtgtctaagcaaaaagtcttaaaagagctgtttgcggcggcaaaagacagtatgtttgcatggacagttacagatgagttagcttttatccgcaagattttggctaaatattctggtcaggcagtagtggttactttcggtcaggtgactgctgagaagcttagcgctactgacatcacgcaattgcagagtgagtttccaaaggcaacttttgaaaatgatgttattgctggtcaagctggcttagtcatttcaatcggacaagtagatgatacgtatttgtatgctgacttgattgaatcaatttacaaggaagaaagttctcgaatcgctgccgatattttcaaagagaattagaggaggtattctatatggattcaaatctcttttctcaaattaacacaacgattgctgttaaagaaaatagttttatcaccgtagatacatttcaaaaaatgcttcaagcggggaacaaggatgacatcgcgcttttgttgcagacaacgccttatcacctatcggtggaagaattggacgatttaacagccattgatgcgagtttgatgcgagaattatcgcaagaatacaaatgggcatttgcagaagcgcctgaaaaaacgattgtcaatatgttttcactgcgttatgtttatcataatgtcaaggttcttctgaaagctaaggcaactggaaaagatttgtcagatttgcttattccgattggtgaacattctttagaagctttgcaacatatgatttctgctttaaaatccgattttttccctgattttatggtggcagagattcgagatatttgggcagaatatgaagattacaaggatattcgcgttctggaaatcggagctgatttggcttactttaaccatttgcaaaaaataacagagcagtctgaaataccagcttttagtcaggcagcaacgttgatgattgatttttataatgttaccacggttcagcgggctttgcgtcaaaagaaaccgcgtagctttatgcttcaattgttgtctgataatggtagttttacggctgatgaatttattgatttggttgaaaataatgacttgatttcatggtttaatcaggttaatccaggtattttagatacttcgctggtggcttacgaagaaaaaatgcgtcaaggaacgatttcagttgtcgaattagaatacctttacgacgtgatgcaatttcaattgcttgaccaagcgcgctatgaggtgcaaggcccattggtcttggcaagatacttgttaggacgagaatttgaagttaaaaatcttcgcttattattatctgccttatgtaatgatatgccgctagaggttgtcagagaaaggatgcgaccaatctatggacaataaaaaatacaaaattggcgttgttggaaatcgtgatgctatcctgccatttcgtatgattggttttaatacttttccagtcaatcatgcgcaggaagctatcaataccctgcgtcaattggcaatgaatgactatggtattgtttatctaacagaagatatcgcagctgaaattccagatactattgcttattatgatacgcaagtgacaccagctgttatctttatcccaacgcacaaaggctcagcagggctaggcttacaacgtgttcaagataacgtggaaaaagcagtcggacagaatattttgtaaccgtccaagcattactgacactaaagtatctagtaatgctacgccaactgctatggcagttgtctagttcgcttactaggattttaggggcttattatcgaaccctcaaaaatccgttgtaatagttaatggtactaaagtatttagtgctgtcacacttggcgttatatcgccaacctaagccccttactagctcgtcggaaagttaaaaaacgaactttccttctcgcgtcgtaacaatttgtttatctgactactggctgacagtaagtgggtgccaactgctatggcagttgcctagttcgcttactaggattttaggggcttattatcgaacccccaaaaatccgtcgtaatagtttaattgggagtgggacaaataaagattaaaaagcgaatcggtaatttcgaagaaattcgatttcgttatctcaaccactgcgctttgtaaataataattatataaaacaaagaagctgagtacttttgtctcagcctctgtgggtgtctgctaggctgctgggagtccgttgtgattgtgaaactatctgtggataatttattaatcatttgacataaatctgttgttttctcaagtgtggttttgttttactttttgaagagtactagcagttgggaacaacaaaaagaaatgcttatcttaatcaggaggaaaaatcttgagccaaggaaaaattataaaagtttcagggccgctagttgtggcttctggaatgcaagaggcaaatattcaagatatttgtcgtgttggagacttgggcttgattggcgaaatcattgaaatgcgccgcgaccaagcttctatccaagtttatgaagaaacatcaggaattggtcctggtgaacctgttgtgacgacaggaaatccattgtctgttgaattgggaccagggttgatttctcaaatgtttgacgggattcaacgtcctttggaccgttttaaaacagcgacgaatagtgatttcttgattcgtggtgtcgagctcccaagtcttgaccgtgaagcaaaatgggactttgtgccaagtttggaagttggtgcagaggttagcactggtgatattttgggaactgttcaagaaacatcagtcgtcgaacaccgtatcatggtgccaaataatgtctcaggaaaactgatttctatcacagcaggtgaatttaccgttgaagaaacggtttatgaaattgaacaagctgacggttctatttttaaaggaacactgttgcaaaaatggcctgttcgtaaaggacgtcctgttgctcaacgcttgattccagaggaacctttggtaacaggtcaacgcgttattgacactttctttcctgtgacaaaaggcggtgctgctgccgtaccaggacctttcggagctggtaaaacggttgttcaacaccaaatcgccaaatttgcgaatgtggatattgttatctacgttggttgtggtgaacgtggtaatgaaatgaccgatgttttgaatgaatttccagaattgattgacccaaatactggtcaatctatcatgcaacgtacagtcttgattgccaatacatcaaatatgcccgtggctgcgcgtgaagcttctatttacacagggattacgattgctgaatacttccgagatatgggttattctgtcgccattatggcagattcaacatctcgttgggcagaagcgcttcgtgaaatgtcagggcgtttggaagaaatgccaggtgacgaaggttacccagcttacctaggttctcgtattgctgaatattatgaacgtgctggtcgtgctcgtgtacttggtcaagaaggccgcgaaggtacaattaccgccattggtgctgtatcacctccaggaggagacatttcagaacctgttacgcaaaatactctacgtattgttaaagtgttctggggcttggatgctccgcttgcccaacgtcgccatttcccagcaattaactggttgacatcctattcactttataaagatgaagttgggaagtacgttgataaagtccaaaaaacaaattgggctgctaaggtgacacaagctatgaatattttgcaacgtgagtctagtttggaagaaattgtacgcttggttggtattgattcactttctgaaacagaccgtttgaccatggaaattgctaaacaaatccgtgaggattatttgcaacaaaatgccttcgattcagttgataccttcacttcatttgccaaacaagaagcgatgcttaacaatattttgaattttgcggatgaagctaaaaaagcacttgaactaggagcttatttcactgaaatcatggacggaactgttgaagtacgtgaccgcatggcacgtagtaaatatattgccgaggaaaatattgaccaaatcaaagcgctatctgaacaagcacgagaagcgattcatcaagtgttagcaaaaggaggtatctaagatgagtgttcttaaagaatatcgaacagtcagagaagttgttggacctctgatgattgttgaccaagtttctggtgttcactacaatgaactggttgaaatcaagcttcataatggtgaagttcgtcaagggcaagtgcttgaagttcaagaagataaagccatggttcaactttttgaagggtctagtggtatcaatcttgaaaaggcgaaggtgcgttttacaggacatcctttggaattgccagtatcagaagatatggttggacgtattttcaatggtatgggaaaaccaattgacggtggaccagatttgattccggaaaaatatttggatattgacggtcaagcaatcaatcccgtggcgcgtgattatcctgatgaatttattcaaacagggatttcagcgattgaccatttgaataccttggttcgtgggcaaaaattacctgtattttcaggttcaggtcttcctcacaatgaattagcagcgcaaattgcgcgtcaagcaacggtattaaattctgatgaaaattttgcggttgtttttgcagccatggggattacctttgaagaagcagaatttttcatgaatgacttacgtcaaacgggagcgattgaccgttctgttctctttatcaatttggcaaatgaccctgctatcgaacgtattgccacaccacgtattgccttgacaacggctgaatatttggcttacgaaaaagatatgcacgtgttggttatcatgacggatatgaccaactactgtgaagcgcttcgtgaagtgtcggctgcacgtcgtgaagtccctgggcgccgtggttaccctggttacctttacacaaacttgtcaacactttatgaacgtgcggggcgtttggttggtaaaaaaggttctgtaacacagattcctattttgaccatgcctgaagatgacattacgcacccaattcctgacttaacaggttacatcaccgaaggacaaatcattttatcacatgaattgtataattctggttatcgtccaccgattaatgtattgccatcactatctcgtttgaaagataaagggtcaggtgaaggtaaaacacggggtgaccatgcggcaacaatgaaccaacttttcgctgcttacgcccaaggaaaacaagcggcagaattggctgttgtgttgggtgaatcagccttgtctgacaccgacaaactttatgtggaattcactaaacgttttgaagaagaatacattaatcaaggtttccaaacaaaccgtagcatcgaagaaacgcttgatttaggctgggaattgttatcaatcctcccacgtaccgaactcaaacgtatcaaagacgatatgcttgaccaataccttccgcaaactaaaacagatgacaagtaatcattaaaacatttagtaaaggaggtaggttctatggcacgtttaaatgtaaaacccactcgaatggaattgagtaacctcaaggaacgtttaaaaaccgcaactcgtgggcacaaattactcaaagataaacgagatgaattaatgcgacgttttgttgacctcattcgtgaaaataatgaattgcgcaaagaagtagaagcggctctggtcggtcatatgcaagattttgtcatggcgaaatctcttgaaaacacacttatggtagaagaaatgttttcagttccgacaaaagaggttcaactgtttattgaaacagaaaatgttatgagcgttactgttcccaaaatgcacagccatattgaaaatccgtatggtgatgataacggtgacgttgtgtacagttatctagcttctaacagtgaaatggacgacaccttggttgccattgagggcttgacagagaaattgcttcgtctggctgaaatcgaaaaatcttgtcaactaatggctgacgaaattgaaaaaacacgccgtcgcgtcaatggtttggaatactcaaccattccacaattagaagaaaccattcactatatcgaactaaaactcgaagaaacagagcgcgccaacctagtccgcattatgaaagtaaaataaaacaaaaagtgtcttttagacgcttttttgttaggttaaatttgtaagcgaattcttttacttataggcggtaaggtgctaaactataggtaatttaagggcaggaggaaataaacatgtctgaaaagaaatatgatgcaaaattggaccaaatcaaaggaaatcttaaagaaggttttggaaaagtaacaggtgataagaaactagaaacagaaggtcttgccgaaaagactatcgccaaaggaaaagaattagccagtggtgtcaaagaaagcgcggaaggtgctgttgaatgtgtcaaaaaagctcttcataaagataactaaataagactatctctctagggagtcatcctagagagattttttgtgtatttttcttgatagagttgtctaaaaattaaaagaaaaagagaaattatggtataattggtgttaaattacgggatggggaggagatttatgagtaaatcatctgcgcaagaaaaaaagcgccaagagagtaatgctaaaaaccgtagattagcaactcaatatcaagatcaagctaatcaacttcaatcaacatttaatagtcgacaagaagaattggatcgtttaaaatctgctagatcatcactaaaaacagcaattagttcctataaagatgttaagaccaacctaaaatcgacatttcaagataatcttgacaccagcaattttaaagggactattaaaacgggatttgataataatattacaactattatttccgatacaacttctgacattcaaatccacagtagtaatttagctactttggggcaagaaataaccaatcgtcaaatgtcattagatttactaggttctcaaattacgagcctcaatcaagcggctagtaattgtttagcggctatttattgaggtggtttatgtcaaagatcagtcttaatgaaaaaaaatggaaaaaagttgtttcttctgctgccagtagcattgacagtattcaaaagataaaaatcatttctattgaaaaaacaacattatcacgttttcaacatattgaggaattagaacataaactcaatactaccttagcaaatttcaaaaaatattcagctgaaaatgctgaaaaaatgaacaaagtagcggataagattgtcaaagaggacaataaagctgctgatcagattaagaagaatacggttaggtttaaatgatgaatgaagatttgaatactcttttttgtgaactattatcggaaaatgacgttcttgctgatgtcgtaacggatgatttgatacaatttgggacttatgttggcggacgtctagaaattcttaaagaatgttatttagctttatgccagcatagggaaagttatacctatcaagcttttttaggagctccaatagaactaaaatttgattatataaaacaaagtgtcacaatttcacgtgaaaatcaatttgaagtccgattaacattagattattttcggattttgcttggattaatagacctagtgtatagtgaagttttgcccttgggtagtgtcatcgaactagatacaagacgttttccagaacagttaaaagaaatgttttcacatactcctggtgctaaagttatcattactggtcgtaaacttcccgtcgcagataacattggacattatgttgttgattatcaagcacaattgtggccacttggctcttttccgccagttagaccaatgactatctctaacatgatgataaaaaatatcattgctcgtggctatcaagatagctatgaaacttctttcagcaagcacttaaaacaatctcagattcaggaaaaacgactatcaacagcatttatgagtcaaaaagaggctactctttttcttgagcaaaacaaaggaggtcattaatgggctttcatgtttcgttagctgagttaaccaaagcagctactaagttaagccaagaagcggagcgcttagaagaacagcttgaaacagccaaaaagagtgttaacaagattatcacctctgaagctttgactggtcaaacaggacaagcgatttaccaccaactgaacaacgttgatgcggcgattctcgttgggttagcggatacgaccaagctccttgctagcgatatgtatcagttaatcgcagcatttcaagcaagtgttggtgaaagctctacaactgcggttttagatgaggattaccttaatcagctcaaagaccagctaagcaactttaaaaatcaacatggggagcaagaagaaaccattgccgacatctatgccagtgttagtgatttgatttcgctctctagcccacaaagtaactacgacacggatagtgatgccgctagccaatacctaagcaataccattgataaggtgacgagctttaatagtgctggaagtgagcttagttctgaaagcctgttgaccgccattgacagcaaggtcaaccaagtcagtcagacaacaagcctaagttatagtgatagtcagtacctaagttttgtcaatgacgctagctttgctaaggggattaagtctgtcaataaacagctaaaagagcaagaaaagctggctaaagaggaagctgctaaagaagcccaggcagcttgggccaaacaacaccctgttgaggcttggttacaaagtcaagccaccaaagatgctcaattctttgagggggcacgacaaaccttagagcagacccattgggattactttggtggggcacttgataaatccctagctttgtccgttcttggctttatctctaaagcctcggaaacggtagaccaattagctattggaattggcgaattgagtcacttaacggttgaagggcttgaaataggagttgattatgttactggtcatcaaacaccccaatggattaaagacgacgtaacaggcgccaccaataatctgcttgcagctagtgagtttactgacagcttgctggctctggacgctgaggcttggggtgctgttggtaaggagcttgagaagattggaacggactttgtcactgctgttaaaacaggtgacgactatgctttaggtggctatgcctttgatgtggctacactagttggtcccgcttcagttagcaaactcaagtacgttgatgaagccagcgcccttactaaactcacagaaaccagcgaagttgcttcgactgttggaaaagttgaagatggggtgactaatgcacaaaagttactagatgaactatctaattatggtggaacagttgttaaagatagtcctaaaatatacgaaactgccatcaacaatagtataaatgagattaatctacaaaaacttccaaaaagtattgcagaaacatttactgatagtgagtataaaacagtaatgacaactgaagaaataaaattatatagaacttttggtggtagagctaaagaacttggtgctttcgcgactactacacctgctcaaacaagaattgattcaaaaatagagaccgctctacttccagagtggggaaatagcagagaattcgaaattgaaataactatacctaaaggtaccatacttaatataggaaaggtggccccacagactatagaaagtacaggaacgaccctatctggcggggctgatcaaattttacttcctaaagactggcctagagaatggattaatacttatagaaaggtacctaatcgataaattagtaggagattgtaatgaataaaatcgataaacaatgtgataacatcttaaaacaattggcaaattttcctgatagttattacagtataaaaagaattaaacaaaaaattctagaagttaaagtaagtaacttagctaacactactgtctcccctctaaatttaaaagattacgctagacattttgtggatgaaacaggtgattatgacaacgatataattagtgagctcgaaaaactaaatcagttattagaggaataatgttatgatacagaatactgaactattaaatttaataaataaattaagaaaattatacaataaaaatactgaaagtgaattatatactaaactacaattatctacttttttatgtcctttatcagtatttatcgataataatcaaataaaaatcgatgtgattacagaaaaaaaggggaattcatacttttcgttatatacagactacgatagttttaaaactgattatccaaatagtgattatactgagcttaatattcaaactgctatcgatataataaatactcagaaaaatatttcaggaattgttattaacccaaatagtacaaattttatactttcaagagaaaatataaactatattaatacactacgctttgaaatgactatcccaaaaaacgaagacattgaaatattacttcctaaaaattatccaaaaatactgatccaaaaattcatagatttctttaaaaattatcctatggttgaaaaagcttatttattaaaaataaaaattaaaaatgaagagaagttgcttttggttgtagaaactccagattttcaaggtattatttctaaactatatcttgatattaatcaattattatcaaatgatactatttattttgttaactcaaataataaaacaatatcggaaatcattaaaaattgtcctatattatataaaaaaagtgaaaatgttatagaaactgttgaaactaattcaatcatagattcaacaatcattactgataactgtctagaacttttgatagacgctaataatttaaatgatttagatattaatcaaaactatgatatgaaattaaaaacaaaaataaataattatattcatttcatcaaaacaaaaggaatttgtaataaattcgaaaaaattattataaatatcaattttaaaaaaaatccttcaaatgaaatattagcactcttagtagatactcaaaaaaaattatttaattctaccatatctttaaaagtcaccttaccaaattaatcttgagacgcattttgcgtctctttccatatatttcccttcgccaatgacgctaaggggattaagtctgtcaataaacagctaaaagagcaagaaaagctggctaaagaggaagctgctaaagaagcccaagcagtttgggccaaacaacaccctgttgaggcttggttacaaagtcaagccgccaaagatgctcaattctttgagggggcacgacaaaccttagaacagaccaattgggattactttggtggggcacttgataaatccctagctttgtccgttcttggctttatctctaaagcttcggaaacggtagaccaattagccattggaattggcgaattgagtcacttaacggttgaagggcttgaaatgggagttgattatgttactggtcatcaaacgccccaatggattaaagacgacataacaggtgctaccaataatctgcttgcagctagtgagtttactgacagcttgctggctctggacgccgaggcttggggtgctgttggtaaggagcttgggaagattggaacggactttgtcactgctgttaaaacaggtgacgactatgctttaggtggctatgtctttgatgtggctacactagttggtcccgcttcagttagcaaactcaagtacgttgatgaagccagcgccctcactaaacttgcagaaaccagcgaagttgcttcgactgttggtaaagttgaagatggggtgaaggttgttgataaggttagcaatatccctaaagagttaaaaattatagaggggaaagttgacggtaaaatcccaattagtgagtataatacataccgtaaaatgagtattatcaaccctgaatctgatacaatgacccttggaaagtaccgtccaacagtatattctgatggtagtcttgattggtccgttccaggtccagattcttatactgttatggctggagatactaccttctttagtttgggaggcgaatgggataagataatttctaattatcatctagatactgagggacatgatatgtttaggtattttaatcaacctgccttagatgatgctgttgctgcaggtaaagagatacgtttttctcacgaccctcgtttaaaacaatacgaaggctctgcacttgattgggaatggaattatttaaaagataaatataattatatagatttggatgaaattggaggatattggtatgcaagcaaataatatgttagaactcgcacgagaaacaagaaaaaaagttagacaaagttttggaagtcgagtagagactattactgtctatgatgttgttgatgttccgaatcatcatatgtttaaacttaattttgcagcttatgattatttctggattcaatttaactatgaaaacggactttgcggtttttcactagtttttaatgaccaatttggaacatctttggggaaaagactagcttacagcgagatcacagattgggacagttaccttaaagatatcatggaagaaattgaacttcgtataccagataaatttttaaaagctaaaggatggctataaaattatggcacatagccaattaagatgggaagatgttagtcaatttgaggaaattgaaggatatggtcaaattgtttggcgtcataacggacagtattattttgttacagaagagggaggcattgctcctcaacttgtcgtctatgagttatcagatgaactctttcaactgcttgatagtggtcaaaagacctcttctgaaattcactttaagttgcaaaacgatgcttggccaccaactgaggaagaaaggaaaatagctaaaaaaaattttttagcaaaacatccaacttctttgattaatgtccctaaaaatagagaattgtttactcaagaagaacttgaagaactgattccaattgcggaagacctctggataaaaggtgaaggcaagctgccagacgattatgtgtcacctttaaataaactaaatttcttattttataaacaagctagcaaaactcaataaagaaatgactttacttgaactgttgctaaagttgagaaaaggttgaaggtttggagagacttattaaaattaattcttccctagttttttattttcatatttgaaaatggctagtaattatgagaaaaagtgatataataatgtttgtaagcgttttaaatcaaacgattaatcatcataattgggaggttgcgatgtttaaagaaattgggacatatattaggatagttgatttgttacttgctattttgttggtactggatagaggtgttaaaagcattttagtgcttgcgatagctatttttattatttctgctgctgtgcagtttatgatgtcttataaacgcttaaaattcacagcgcatccgtaacatttattgtagaggtagagtaaaaaacatagattaagtcttagacgtgtgtccgaggcttttttgtttttgcgaaaaatcatccatagtgctgaaaattctttcttacaattctgtaagagcttgcggtgaaaatttggttaaactgaactttagaggaattgccacaaatttgccttagttttgcaacaatttgcccaagatttctccagtgaatttgattatactgatttagtatgaggagcaagtcatgaaagaaataagtcaatttgtcctaaagacattactttatgtgttgatttttttagcattaatctattttttcagttatcttgggcgtggtcagggtaacttcatctacaacgaattttagaaaggtaagttttcatgttacacgatatgattgaaagaattgagcattttgcacaagtacaagctgattttcctgtctataatattctgggagatgttcacacttatggtgatttaaaggctgattcagatgccttggcaacctacattgattttttgaaaatcgaggaaaagtcgccagttttggtttttggcggtcaagaatatgaaatgttagccagttttgttgggctgacaaagtcaggtcatgcttatattccagttgaccaacactccgcccttgagagaattgaagctattttggcaatagcaaagccaagcttgattattgccattggtgactttcctttggaaatcacacacattcctatcattaaatccgcagagctcaagactatttttgctcaacaatcagattatcacctcacacattctgtcaaaggtgatgataattattatattattttcacgtctggcacaacgggtcagccaaagggcgtgcaaatttcgcatgataatttgcttagttttaccaattggatgattgaagcagaggctttttccgttccgcaacgcccacaaatgctggcgcagccaccgtattcatttgatttgtcggtcatgtactgggcaccgactttagccttgggtggcacgctttttgcgcttccaaaagagttgacaacagactttcaacgtctttttatgacgattaatcaattgccgattggtgtttggacatcaacgccttcttttgttgatatggcaatgttatcaaatgattttaatcatgaaaccttacccaacttgacgcatttttattttgacggcgaagaattaacggtgaaaaccgctcaaaaattgcgcagtcgtttcccaaaagctcgcattgtgaatgcttatggtccaacggaggcgaccgtggctctttctgcggtagctatcacagatgagatgttagcgacttgcaagcgtctgccaattggctacaccaaagccgattctcccacttttgtcatcgatgaaaatggcaatcctttgccaaatggagaacaaggtgaaatcatcgtgtccggtccagctgtttctaaaggttacctcaacaatccagaacgcacgcaagctgctttcttcgaattcaatggtttgccagcctatcacacgggtgacttaggtatcatgacagaccacggtatgcttctttacggtgggcgcatggattttcaaataaaattcaacggttaccgcatcgagcttgaggaagtctcacaaaatctgaataaatcaacctatatcaagtcggctgtggctgtcccgcgttacaacaaagaccacaaagtacaaaatctgctggcttacgttgttttaaaagacggtgttgcagagcaatttgagcgtcaactggacattaccaaggcaatcaaagaagaactcaaagacatcatgatggattacatgatgccgtctaaattcctctatcgtgacagcttaccactcacaccgaatgggaaaatcgatattaaaggcttgatgaacgaggtaaatcgccgatgagtgagtttcttcagcaattaccgcatttggaagcttatggcaatccgcagtattttctgtatttgattgtggctgtgcttcccattttcatcggattatttttcaagaaacggtttccgctgtatgaagccttggttagcctagctttcattattttgatgttaacgggaaaaacggctaatcagcttgtgtcgttgttagcttatgtcgtttggcaagtaattctcgtcttttcctacaagatttaccgaaaacgtcataatcataaatggattttctatctttgggtgtttttgtctattttgccattagcttggaccaagctgacacccttgatgaccattgacaatcaccaatcactctttggttttttaggaatttcttacctgacttttcgtgcggttggtatgattatggaaatgcgagacggcgtgctgagtgaatttaccatgtgggaattcttgcgtttcttgctttttatgccgacattttcaagtggtccgattgaccgtttcaaacggtttaatgaagattacgagaatattcctgaaaaagctgagcttctgaatatgttagaagaaagcgtgcattacttgatgcttggttttctttacaaattcattttggcttatgtttttggtagcttgctattgccacagctaaaagagtgtgctttgcaaataggtggtgtgtttaacattgcaacgattggcgtcatgtatgcttatgggtttgatttgttctttgactttgcaggttatagcatgtttgcccttgctatttctaatcttatgggcattaagagccctgtcaacttcaatcaaccttttaaatcacgtgatttaaaggaattctggaatcgttggcacatgagtttgtcattttggttccgtgattttgtttttatgcgtttggtcaaggttttagtcaaacacaaagtttttaaaaatcgaaatgtcacctcaagtgttgcctacattgtcaatatgctaatcatgggcttctggcatggattgacttggtattatatcacttacggtctttttcatggtattgggcttgtgattaacgatgcttgggtgcgaaagaagaaaaagattaatcgagggcgtaaggcgcaagatttgccacctttgccagataacaaatggacgcaggcacttggtatttttatcacatttaacgttgtgatgttgtcatttttactattttcaggtttcttagaccagttgtggtttccaaaaacagctgggaaataaaccgtttcagatttaaaaggagtttatcacatggatattaaaacagatgtattagcgattattgatgaccttttcatggaagatgtttctgacatgatggatgaagatttatttgatgcgggtgtgctagatagcatgggaacggtggaactcattgtggaattggaaagtcattttgacattgatattccgatttcagaatttgggcgtaatgactggaacacagccaataaaatcattgcgggaatagaggaactttgccatgcttaagcgcctctggcagattttaggaccagttgtctgtgctgtactgattgttcttttggtttttatctgtgttccaacagctaatcaaaagcatgatttaaaagctgagaaaaaagatgcggtgtcattaagcaaaacgagttttaagagtaaatataaaaaggtacgtgccttaacagatgctaagcaccgctttgttcccttttttggttctagcgaatggctgcgctttgataaaatgcatccgtctgtcttggcagaaaaatatcatcgcgactatacgccttatttactcggacaacgtggctcggcttcgctaacgcattattttggtattcagcagattaataaagaactcaaaaataaacaagctgtttatgtaatatcaccacaatggtttacatctaagggagcgagcgctagcgcttttcaagaatattttagcagcggacaagcgattgatttcctaaaacatcaaaaaggcagtgtttatgaccgctacgctgctaaacgctttttgaaaatgtaccctgactcttcttttaaggatatgatggaaaatgttgcggcaggaaaatcattgactgcctctgacaatgaaaatctcaacacgcaacagatgattttccagaaagaagatgctctttttagccaaatccctatgtttgacaattacgacagcaagattaaaccgcaagctaagaaattgccagcttgtttttcttacagcaaactcggtggcatagctattgctgacggaaaaaaacgaagtagtaataatacctttgatatcgacaacactttttttgacacacgtcttaaagcgcaactcaaacgattaaaacagtctcaaacaaaatttaattacttaaactctccagaatacaatgatttacaactagtgctcagtcaatttgcacaggacaataccaatgttctctttgttatcccaccagtcaacagtaaatgggcaaattatactggtcttaatcaagccatgtaccaaaaaacagttgctaagataaagtatcaattgcaaagtcaaggctttaccaatattgctgatttttcaaaagatggcgacaaacctttctttatgcaagatactattcacatggggtggactggctggttagccatggacaaagctgttaatccgtttctaagtcagaaacaagccacaccaagttatcacttaaatgaccgatttttaacgaaagcttgggcaagctacgacggctcagttcagcagtttaatgcaaattcttaaaagaattccttgtcataatcggcaaggaattttaatatttctgttgttaaattttcatatttgcaaatttctgaaaatagcatcttttgggagtacaatatccttgtaagcgttttatagaccgaaaatcattacattgaaacgcaaagaaaggaaatcatgttaaaagaaattgggacgtatgttaggattgccgacttattacttgctgtgctattaattttagataggggtgtcaaaagcactctagtcatcgcaatagtcgtttttatcagttctgttatcgtgcagattatgttatcttacaaacgtttaaaaatagcaaacaactataactaaattatcatttcgctttctggattgttatttttaatttctaaaatcattttaccttctgaaacattgtgatattttgaatttaaaacgctcaaatggccatttaacacttaatatttggagaatatctcccgactatcacaataggaggtttttaatgatgcgaaaggttttacaatccattttagtaacttttctcggactcggactgttattgtcagcccagaaagttgaagccgtcgatgctaatcggcagagcaatgtcgctgtgacgaatactagcattgtgattaataattacgagtttggtcctggtgttgataaaatcgtattgcaaacgaatgcgtctttgcgaaatgttgatgctagttcagcaacggtgacaacagcaggtataacacgtcaagtcacaaatgcctacttgtctgatgcaaatggcaatgcggtgcagtcacggggcggtagaaacaccagccaatacattacactagaattgagtgtgagctataataatgatgacccagcacaaagtgcgtcaccgtttagttttgatttaagcacttatcgcaatacgtgggtgagtagttatgtggtcaaagtcgaagggcttaatgtgactccgctttatggctacaacagcactcaattgaatgctgaacaagaggctattaataataaaatcacgccttctgctaatcgtttcacggaacgtggcagttatagcttatcctacgctgcctaccaacctgagtcagcagcaggtggtgaaaagaatccattgattgtgtggttacatggcattggtgaagcaggaacggatattaatttcccacttttagctaatgaagtcaatctattaaccgaggacactattcaaaatcatttcacctcgacaggaacaggttctcaacgtggcgcttatgttttagttccacaatcaccgacagcgtgggggcaaaatcaagcagaactaatggatacgattaatcagtatattgctgctcatccagatattgatagcagtcgtgtgtatttaatcggaggctcaaacggagctgccatgtccgttcaaatggggctcacttatccaaatacctttgctgccttggtaccaattgctgcaccgctttcttaccaaatgacaatagctgacagcggtgaggaaatttatagcctagatgagagcacattaacagctttaaaagaccagccaatgtggttcatcaccgcgcgttcagatgccagcgttcctgtggataccaatactttgccgtattataaagctttgctcaatggcggagctactaacaaatggttaacctactacgaaagtgtcgttggtacagaattagcccaagaatacaacggtcattggtcttggatttacctctttcatgaccaagccacaggcgtccaaaacacaacgaatgtcgttacatggtcaggtttaacgggcatggttgcgacaaacccaaccaatggtggtgacgcccaagcccaagtcaacggcgtttcttataacaatattttcgactggctaaacgcccaatacgcaactaattattaatctaaaaaccccctccttataggattcataaggaggggttagtgtttataaagctattatcattttgctaaggaaagtccactaagaaattttttcgattaggcggaccaaatctttggcttcttttgagaggatagcatgtcgtgaatgagcatagctgacgtagaaagagatacggtcttgctcagccagaggcactttgaccaattggtcagaacctgacgttagcgcaatatcagacagcaatgaaatgcccatgttttccgcaaccatttgcttaattactgaaacatcatcgattttaaacaaaattgaagcttggtcatggtaacgatgattgagctgattaaaagcggttaggtggatattatgctcatctaacaagataaatttttcgtaaagaatatcctgaaaagacagttctttctggtttgccaaagggtgttttggagagagaacgacataaaaatcttttttaaacagcggatgaataatcaactggtcgtttttgagcggcgctagcgaacccaacagactgaaatccaattgtccatctagcaatttcatcattaaactattagagccaccacgcacagccttaacttgtgaaaatggggcgatactttcatttttgtgaaggagttccgtcagcaaataattgcagataatcggtggcaacccaacagccatcataggattgagtgactgatgtacctcgttgaccgctgtctttatttgaagtagaacatcttcaacatggctttgaaaaatatcaccttgcaaagtaagtgctgctgagcgatgtgacgggtctttgatgaccaaatcacagcccaattctttttcaagtcgtttaatagcataagtaattgtcggttgactaacttgaaaatattgtgcagcagcggtataagattttagctttgctaattggtaaaaatattctaaatctcgtaaattcattcagacctccttgctttattttaccataatcttttaaaacttattataaatattatttatcaaaactatggcgtttgactataagaactggaacagtttataatgacccgcataagaaatttcttcttatttaatacatttttaggaggatacgtcatgcgtggacatgatattttaaacaacccattcttaaataagggtactgcttttaccatggaagaacgtaaagaactaggattgcttggtattctaccaccttacgttcaaacaatcgaagaacaagctgaacaagcttatcaacatttcttgcgtaaaccatcaaatcttgaaaaacgccatttcttaatggaaattttcaacacaaaccgtacgcttttctactacctattcaaccaacacatcgttgaatttaacccaatcgtgtatgacccagttatcgctgaaacgattgaagaatatagtgaattgtatgttgacccacaatacgctgcttaccttgatattaatcacccagaaaacatcgaagaaacattaaaaaatgctgctggtgaccgcgatattcgtttaatcgttgtgacagatgccgaaggtattcttggtattggtgactggggtgtccaaggtgtggatatttctgttggtaaattgatgatttacacagctgctgctggtattgaccctgcttcagttatgccacttgttatcgatgctggtacaaaccgtaaagaacttttggaaaatccaatgtatcttggcaaccgtcacgaacgtgttactggtgataaatactatgaatttattgacaaattcgttcaaactgctgaaaatatgttccctaaattgtaccttcactgggaagatttcggtcgttcaaatgctgccaacattcttaacaaatacaaaaaagaaattccaacatttaacgatgacattcaagggactggtattgttgttctcggtggtatctttggtgccatggacatcacaggcgaaaaattaactgaccaagtttacctttgctacggtggtggttctgctggtgctggtattgctgaccgtgttcatgctgaaatggtttcagaaggactttcatcagaagaagcttacaaacatttcttcatgattgacaaacaaggtctccttttcgacgatatggaagatttgacacctgcccaaaaaccatttgctaaaaaacgtgaagattttgcaaattgcggtgacatgactaaacttcttgacgttatcaaagctgttaaaccaacaatattggtcggaacatcaacagacgctggtgctttcactaaagaagtcgttgaagcaatgtgcgaaaacactgaacgcccagttatcttcccaatttctaacccaactaagaaattagaagcaacagccaaacaagttatcgaatggtcagacggtaaagccttcgttgcgactggtgtgccttcaggtacagtaagctacaaaggcgttgattaccaaatcggtcaagcaaacaatgccctaatctatccaggtcttggtcttggtatgttggcttctgaagcatcacttcttacagatgaaatgattggtgctgcagctcactcacttagtggtcttgtagatccaggtcaaccaggagcacctgttcttcctccattccaatacgttgctgaagtgtcaatcaaagttgcggaagctgttgctaaaaaagctcaagaacaaggcttagctcaagctgaagaaaaagacatggctaaagctgttcgcgaccttaaatggtatccaaaatattagtttaggaggataaccattcgtatgaaaaagttatctaatatcaaaattgcagggctttctcttccgctttatacggctctggttatcattttagctgttgttattgcaatgggaaaactaccgctcaacatggttggaattactttcatgttggtcgttttaggacatcttttctacttccttggtgaacgattaccattttggaatacttaccttggtggtgggtcagtctttaccttgctgttagccgcaatcttagcttcaacaggattgattccaaaatcagttgtctcagccacttctagttttatgagtgattggggctttctagatttttatattgcagcgcttatttgtggctcaattctaggaatgaaccgcaaacttttggtgaaagcctctgctaaattcattcctgtcgctcttttatcaatggttatcggtttctttgccactggtgctgttggggctttgctcggtcaaggttttggacattctgtcatgtacatttcatttgcccaaatggcaggaggaatgggtgcaggaatcgtgccattatctaaaatctatgcggctggattgcacacagatgcctcatcaatcttgtcacaattagccccagcaaccacgctaggaaatatttttgctattatcggtgccattgtgttggcgcgtggatttgctaacaccaaattcaatgggcacggtgtgctcatccctgttgacaaagacgatttgaaaaaatctgaagctccgcttgaccctacaaaaatcggtgtcggaatgatgcttgcctttgcccttttccttatcggcgttatcttaaatgcctttattccaaaagtgcacagctatgcctttatgattattattgtctttgttctcaaagcgcttgatattgtaccaaaaccattagaagaagcagtggtcatgtttaatcgtgtgattatgactaacttgacacacgctgttttggcaggtatcgggctttcaatgattgatttgagttcattagcgcaagccatgacatggcaatttgtccttatcagtttaacatctgttgtgtcaatgggacttgctagctggattttgggacaagttctcggtatgtatccagtcgaaacagctatcggtgctgggatgattaacaattccatgggaggtacaggaaatatcgctgtgctttctgcggcggaccgcatggaaatgattgcctttgcccaaatggcaaaccgcctaggcggcgcaattgtcctcatcctaggaggaatccttatccaatttttacattaattcaacaacttctggaaaaatattcatccttgttctttggcaagagtgaatattttttagatgatataataaccatgtaagctatctgtagtgagttgaaaaatgactagaaagttctagtcatttttttaagctctaaattttgatcaacttatttttaagtaatatttgacactgcaacataattaagttatattaaatataaaattaagtgtgcttaatttttaaatataaatattttacggggagttctataatgaaaaagataacatcactcatatgtttattactaataatgtgtattttgggagcatgtgctactacaaggacatcagaaaagaataagttaaatgttgttgtgactaattctatattatctgatattactcaaaacattggtaaggataaaataaacttacacagtattgttcctattggtcaggatccacatgaatatgagccacttcctgaagatgttaaaaaaacaacaaattcagatattattttttataacggtatcaatttagagactggtggaaatgcatggttcaccaaattagttaaaaatgctcataaagaggctaataaagactattttgcggtaagcgatggtattgatgtcatatatcttgagggaaagaatgacttaggaaaagaagatccacatgcatggttaaacttagaaaacggtattatttatgcaaaaaatattgcgaaacaattgatagctaaagatcctaaaaataaagaattttataccaaaaatcttactagctatattaataaacttgataaattagatcaggaagctaagcaaaaatttttaaaaatcccagaaaataaaaaattaattgttacaagtgaaggatgttttaaatatttttctaaagcgtatggcgtgccatcagcctatatttgggaaattaatactgaggaagaaggaacacctgagcagactactagcttagttaggaaattaaaagaaggaccaacgccgtcagcattatttgtggagtcaagtgttgatgaccgtccaatgaaaacaatttctaaagaaacaggaattagtatctattcaaaaatttttacagattctattgctaataaaggtgaagaaggggacagctattatagtatgatgaagtggaatttagataagatagccgaaggattatctcagtgatgatatgtatgataaagttggtgaaactatgaaaggagacaaatgatagagatacaaggattaaatgttatttataataatgattatcaagccttagctaatgtgtcaattactttagaagaaggaaatattattggggttattggaccaaatggtgcagggaaatcaacttttatgaaggcactattagggttggtttcttgtacaggaatgattactatttcacacgaaagagttaatagtttacgtgggaaagtggcttatgttgagcaaaaaagtcatgttgactatcattttcctattactgttaaggagtgcgtatcccttggtacttatcaacgagttggactttttcgacatttaagcaaaaaagagtggggaaaggttgagaatgttttaaggcaagtaaagttagaagaatttagtaatcaccctatttccactttatccgggggacaatttcaacgaatgttaattgctcgatgtttgattcaagagcaagatattctttttctagatgaaccatttgttgggatagacctggtgagtgaacaaattattatgaatttattgcaatcactaagaagagaaggaaaaacgattgtgattgttcatcatgatttaagtaaggtagtggattactttgataaagtagtcattttgaataaaaagttggtaggctatgggaacgtagctactgcttttactcctgatgctttaaaaaaagcttatggggattcgattgttgtattataagagggtatttatggaatttattaacgatttaatgacctatcattttttacaaaatgctttggtaacggctgttgttattggaattgtttcaggagctattggctgctttattattttacgttcaatgtcactgatgggagatgcaatctcacatgcagtattacccggagtagctatatcttttattttaggaattaacttttttattggagcagttatcttcggtatattagcttctttcatcataacttttattaaagaaaatagtgttattaaaggggatacagctattggtattacgttttcttcttttctagcgttgggtgttattctgataggagtagccaacagttcaacagacctctttcatattctatttggaaatcttttagccgtacaagatagtgataaatgggttactatagttatttcaggaattgtaatagggtttcttattatttttttcaaagaattgttagtaacctcttttgatccaattttagcggaatcaatggggatgaatgtcaaattttttcactatcttttgatggtactattaactttagtttctgtaacagcgatgcagagcgtagggactattttaattgtagcaatgctgattacccccgcagcaacagcctatctttatgtgaatagtcttaaggcgatggtactcctatcatcaggaattggagcgattacttcgattgtagggttatttttaggctacacgtttaatatagcagtaggctctagtatcgttttaacctcagcctttatcttcttagttagctttttcatatctccaaaacaatcttttatgaagtgacattaggtaaacaatgtatcctaatagaaattagaacctattttattgtaaaagtctaaatgcttaagtatctggaatatgaagaaatacgtttgcatgtgctaatagtaataaagatattaatactatcagttcagaaatactttatttttaaaattaccaagtactgtcagctagttgataaccatagttgtagtgtagagcgcagacaacccctctcagcagtataaatattgtaaatttagagtgtgtctacgatttgaacaaactcttaaaaatgctgatataacggcgtttctaagagtttttatttttttaacaaaaagaaaaaagattgaagaaaaatatccaaaatggacttttcttcaatctgacaggtactaataggtataaaagctgtattttctactagctttcctcgtaaaatatatcctatatctcgataatttggtcaaatagtgctctattttcgtcatagagatgatgcgtaatcatgataactgttagttctttggtttgaagcagacgtcgttcaatattaatagcggtcgttttgtctaggtttgaaacaccctcgtccatgatgagtattggtttgttaccaattaattcacgggcaatagagattcttgctctttgtccaccagacaagtcatcgttgtagatttgattcaaacgtccctcaataaagttgtccacatgtgacagtgataaagctttttcaaactgttctttatccacagaacgaccaagtgtcagattatcaagcaaagattctttaaaaatatgtggtttttgaggaatcaaggcaaaaatagtttgtaaactttctagcagcgtatctttgtaatgatgattatcaatcacaatgtcaccgtcatagcgggtcaactctcctgttaatactcggattaatgttgattttccagcgcccgatccgccaacaatagcaactttttctcctttcttgatcgtaatattaggataggtgatgctattgccattttcaaaagtgacacacaaatcgtgaataaccaattcttgattaaagttagttacagtatcgagattctcaatacttacttttttaggatatttctctagcaatttaaaggtcgctttaaaggtaacaatgttataagcagctcctctagtgtagttgaataggcaactggttagattggcaattgagaaaataacccccgtagtgatttcccccttaatgactagataaccagtaaccataaaaataattacttgtgccacaacacttgacatcaatgaaagagaattagccgtactagagcttcttgccaacttaaccttggattttatcactgtggaaaagtctgctaaaatgcgatttttaaagtaagcagtttgattattgtggaaaaaaatgtcaaaaccacttaaataatcacttgtacgatttaaagcaacggtcaaatcagatgagacagtctccgtttcttgtgcaatattattttcaaaaattttaggaagaaagtaaactaaagcagtcattaaaatactaaccgcaagtagtagccaatgaaaataaatgatagcaaaagcgttaaatagcacagttataatactttcaatggcgctgtataactgattgaaaccgttatcttttaataaattcatgtcattaattaaccatgaattgtattcgtccttgctatgatgagagttacctgcatatgaatgactaattaaagaatctaataaatcattacgaataagattgacttcttcctgacacagcttttctttcaaggaatctttccaaatctgaaaaatactgtatcctccccaacaaagaatatcaatcacgctccaaaaaacaaagctatcccatttactttttatcaatgaatccaacatccatgtcaaggatagcgaactcatgacattagaaataacccagaaaatgatgatagcaagcaaaagtagattttcttttttaaatttccatagatatgtcaacataggcatccagctcttctttttttaatgtttcgtttatatttattatacaaaataaatgcgaagaagcaaacgcttgcgcaatttttctgaattcttcgagagaattgaaactagctaagaaatcattgcctatgttcaatatgttataataaagagaagatataaataaaaagttttctttcaaattcctagtatgagaccttaagaatatcgcagaaacaacaagtcttaaagggggttaccatatggcagataaaataaaaaaagcataccgtgcttcaaaagggatttatgatgatgttttgacacaaagaagtctttttagcaagctttatatcaagttgttttggagcggagtggacgataataaaattgccagagtgattcttgactatattccagaggattttagtggtgttttgctagatgttcctgtaggaactgcggtttttacgcaggaaaaatggaagagactgttaaatgctaatattatctgccttgattacagtgaggatatgattttacaagccaaaaaacgcttagaaaattattcgcatattttgtgtatgcaaggtgatgtgggggagcttcccttagaaaatagctcttgtgatattgttttgagtatgaatggctttcatgcctttccaaataaaaaccaagcttttcaagagatatggcgcgtggtgaagcctggtggtaaatttattgcttgtttctatatcaaagggaaatcaaaaattacagattggctagtaaaaaatattctttccaaggaaggttggtttaccccaccatttcaaacagaaaaacagctaaaagatttgttagaaaatttatattcaaaaataaatctccatacagaagggtcaatggtttattttgaatgtatcaaataagtgaggataaccaaggaaaatttccttggttgctttacgttacagatagataattttagtaaaatagaaatgaataatatttggaaattatttctaagtaaaaaataggtgttatattctaaaaagagtgagtcaaacactgatggttgctttgccgttatcgttgtttgactcaatttttttgtgttgcaataaaatgatgcaaaaagtaactctttataataaacctgtgttaagtttttctcatataaataacatatgttaatgtgatgtcgtttacttaaaaaacataagtcataattattgacaattaatttctgctagtttaaacttgtttatcgttaatgtgaaaaaatgtgaacaagttataaatatataaatattttataaaaagtagaaaaactattgacagaggaaagggggcttgctaccatgagcagagcagagcagagcagagcagagcagagtctaaaaaggctttttttggcgtacagttatttattttaaaagtcactttttcgtgtatctatataatagttatacgaaaaagtgactttttgtgtctcttaaatagcaatgattttatatgaaaaggtaaagaactctatgaatgaacgtacactgaaacaattaaaaaagatagaactctatgagattttgttggcacaaagtaaagaaattgacagattaaaacaagagttaatagaaactcaacaaaagttagaaaataagcagattatcatccaagaagcaggatcattggcagatgccgctctcaaattaactaaaatttttgaggaggcgcagaaagctgctgatatttatcttaaaaatattacggagaatgatgatgaagaaaaataaatccactaaaccacatcctctccctgagacgactgttattgaacaagcttataaatcagcacaataccgtaaaaactttttggaaatgtttagaagcactacttttatgttaattgtggttgctgcctttgctgtactggttgcaatactatttttaccaattttacgtatttacggcaagtctatgaagggaaccttgaatagcggagatatagttgtctctgtcaagagtggtaattttgagactggtgatgttgttgccttttattataataataatattttggtgaagcgcgtaattgcagagtctggtgattgggttgatatggatgaaaaaggaaatgtttatgttaatggaaaaaaactaaatgagccctacttgagtaagaaagcctatggtaaaaccaatattacctttccttatcaagtaccagaagatcgtatttttgttatgggggataaccgtgaagtgtcgattgattcacgaaatacttctatcggagcggtttcagatgagcaaattgttggacgtttagtttttaaagtttggcctctttcagaaatgggaatcattgaatagtggctttattagttaatatgagaaaggaggatgagaatttatgaagaaattttttaggagagaatatttagctcagttcaaggctaagtataagaaagtaattggtgctattgctgtaattgtcgtctttgtgacgacctatgctttgatattgccagcattgactttagatagtaatgctgccaatcaaacgcctggtattaatacggaacagtctggcagtgtagatgacaatacaacaagcacagaaaattcagactcgcaggctgtttctgagacgaatgtgtctagccaagatgaacagctagttactacagatacgactttgattgcagatgataaaagttatcaagtaacagctgatataacagctgaggctaaattaccagaaagtgtggcacttgaagttaaccaaattaagccagaggacgatacttaccagagtaaactacaaaaaatacaagacactttgtctttaaatactgtggcaaatattaggttttatgatattgctttcatgcaaggtgatgctgaagtggagccgtctgcttctgtgaaggtgaccattactcaaaaggataattttgaggctaataaagataatctaaaagttgttcatatcaaaacggatggttcaacagaagtattggatgctgaagtggcaggtgatggtaatcaggtaacaacagttacatttaatagtgatagtttttctgattttgctttagttgatactagtacatctgatgattcaatattaaatagttcatcaacaggaacgaatgttgacgcttccgtggagagcacaacagaaacagagacgacgtcacagagttacaccgtgaccttctacaatgacgatagcgaaatcacttcaacgcaaattgaggctgggacagcattaacaattctgccagaaactcctttcaaatcagggtatcgttttgatcattgggaaaatgcagagacgcatgaaactgtcacagcagatacgattgtgacgagtgatttgacggttaaggcagtttttacggagatttcaatttatacggttaccgtaaattactattatcacaataatagtgccaatcaggacgtcacctttgataaggaaatcttccaattggaagaacgggatactccctatcaaattactccacctacctcaactgaagttaaaagagaagaagatagtactttaaccgctgatgcaatttattacccacaagaagcagttattgaactcaagtcaggtgatttggcaattaaggatgagttagatggaaatattgatggtaaggtgaccatcaatttacagtacgtgccttataccgccgagtatacagtacattatatgttgaaaaatttaacagatgatgactatactgtgattcagagtgttaccaatcacggtgttctaggttctacggtaagccctcaagttttgtcttatgattatgctatttttgaaaaaacagaagcgacaaaattgacacaatcacagggacaagatctctatgtttattacacacgcaacagctacacgctttcctataataccaatggtggctcttatatcccttatcagacaggtctatacgaaagtaaagttagtctgaccgataatgtgccgacaaaaacgggctacacctttgttggttggcatgaaaaggaagatttatcagacactgctaaaaccagtggaacgattacgctggatagtgataagacactctatgcagaatggaaagctaatactgttaattacaccataaactactataaagaagtttataataatgctacgggaacaacgagttatgtttatgatagtgctgtatcagctagtggaaaggttggtgctaccgttcaagctgatgaagctcctgccttgacaacagttccaacaggatacgaacgtgaaagcgcctatggtatgaatgctaactctaatgttacgattgcagctgacggtacatcggtgctgaaagtgtattatagtttgataagatatacctttgtatttaatttgaatggtccatattactataccaatggtttctcaacgggtagaatttcgaagaatgggtcagactactataattctaactacactattcaaaatgttgttttagggcaggatatttcaagtcaatggccatcaggtgatgatgttacggatacatataattattattcttttgtaggctggtcttctaatactactacagtcttatttgttacacgtcgtcatgaagtgactgaagatatgattctaggagctgatagttcaaatcgtaagacttatacagccaattggcaaacggggttaatcactaaacaagttgattattatttgcaatcagctaatgatccaaatgtttacgaactatcaagtaaatacagtcaattctataatagtcaggcgaatacgatgttaaatcctaagaatatagctggttttactattactgaaacgccttcaggctattcaaactcgacgggttattattatggaagcacctatgtcgttgatcattaccgtttctactatacacgtaatacttacagtattgattattactataatggtagtaatataaataccatttctagcattccatttgagcaaaatattaactcttcaacctataactatacgcctgaacgtccgccaggtattgatgctgattacacttggggaggttggtatacggatgctggtttgacggtgccttatacctttgatactatgccttcccataacctagtcctttatgccaagtgggttgcgccaacttttaatgtgacttttgatttgaatggtggcgatggagtagcgcctacgacacaagaggttgaaaaatacaaaacagcaacttcggtagcagatccaagtcgtcaatattataattttgatggctggtacacagcaaaagaaggtggtgaacgctacgattggtcacagccagtaacctcagataccacactttacgctcattggtccttgaaaccattgacctacacagtgcgttatcttgacgcggacaataataacaatcaactagcagcggataaaacagttaccagtcctgcgctaaattaccaacaagtggttagcgagagtgctttagctattacgggttaccgcccagatgctaatagcaagaacgttgtgcttgattatgatgccgacaacaatatcatcactttctactacaccaagaagtctgctcaagtgtcttatcgtgtcgactatgttttgaaggacaatccaacagtgaaagtcgctgagagcaagtcggtgacagtggatggtagcacgatttcagttaaagaaagtgcggttacagttgataaaggctatctggctagtcaactcggcacgatgcctgaacaactggatgattactatgctctgacagatgttgaaagcctgaccttgacctcaagttcagataacaacgttatcactttctactacgtaccttacgacacggctcatatcacggttaattatctagatatggatggcaatccgattgtggggcaagaacctttgaacacgacacgcaagaaaccaagtcaatatactgtcactcacaagactattagtggctacacttatgctcagtctgaagatagcaatggtgataagaacaaagttaattacaagattgacaagggcgataacatcaccattaatctctattatcaaaaagatctttacatcgaagctgttagcaaggaaaaaaattatgacggcatcgctttggaaaatagtggcttgactgacctcaaagatagctacaaagaattactggaaacagatgatagtttgacagggatttccttcacaggtagtcagatagacgcgggatctagtgcggtgacaccaagcatcgccttggttagcagttcaactggcaaggcgcggaattattactataatatcatctatgtcgcgggtactttaacggttaataaacaacctgtcaccgttatcgtcaatggtcaagataaggaaaagacctacgacggtgtagcagaaagtatcagttatgacgacttggtcattaacgatagtagtggtctttacaaagaaagcgacatcagatttacaggtgacaagaccttgtcggcaacggatgctggcacctataatctgactctacaaggtaaatttaccaatagcaatgctaactttgaggtaactttccaagtaagtgacggtcgcctgctgattaagccacgtcctgttatcttgacctcggcgactgctgaaaaaggttatgatggcatggctttaacagcccaaacagtaactgctagtgagccaacagctgccacaggttttgtgacgggtgagggtctgctctatgatgtaacaggtagtcaaacagctactggctcgtctgacaatactttcacttatacagctatgaatgctgctaccaaactgtctaactatgacattgccacagtctatggtcgcttgactgtgacaccaacggtcaatattcaaaagaccaagacggattggacagccttgacaggtggtaagtttgagattagcaagtggaacggcaatacttggacatctattgatggcgtatcggatttgactatcacttcaactgatggtgtgactattcccgttggtctaaatactggtcgttaccgtatcacagagacagcggcgcccgatggctatgttatccttgataactcagtttattttgctgtaacagaaagccaagcagagaatggtcagtctagctttgccatttccctaacagacgaaaatgggaatactatttctaacttagagaatgtgaaagtcttggagggaaatagtagttatagtacacgtattcaaattgctaatgagactggaaaggcactacctcatacgggtggtagcggtcgtatgttttacgtgttagccggactagctctgatgttggttactctggcttatcgtcaatatcagaaacatcgtgaaaggagtgatttgccttaagaactcctaaaatacgttaagggcttgattctagcctaacttttacagtttttttctaaaattatcattatgaaaagaaagaggattctcatgaataaccttaaaaagattttaactccctttttgaccgtcctcgcgttggtctttgtgtgtggtgcagtaagtgcacaaacagttgactcaggtgctggtggatcagcaacaatcactatcaataatgcttctcaagggcaaacctacacggtttataaactctttgatgcaactgttgatggcaatggtgccatctcttacaaaattccaagtggtaaagccttcactggcaatgacttttttgaagtagatgccaagggcaatgtcactgctaaggaaaatgcagatgtgtcatctgatgccttcaaaacatgggcagctagctttggtacccaagcagctacagctgtcgctgctgacaacactgtcacatttaccaaccttgcctatggttactactatgtgcaatcatcactcggtgcgacgatcacagttgatagcacaaatccagatgcgacaatcaaagataaaaataccactgcaccaaatatcccagatgacaataatggcggtggtaaacacatccttgtgaatggtgaaactgttgatagcacaactgccaaagttggtgacacagtaaactatcaaatcaaatttgaagcaactaactatgttacaactgaaacagattcaaaacaaatcacgaagtatactattattgatacaccaacaaatttaagcattgataaatcaacagtagttgtaaaagttggtgaccaaacagttacgactaatgttgatacacaagtcgatgattctggcaaaatgacaatcgttctcacatgggcagatactgctgggaaaaccatctacaactcaccttcaacggttgtgattacctacaatgctactgttacaaaaggtgctgctgacgctgctgcaaccaactcagcaactattggctataatacagctgataaccctaatgaagatcctacaccagtcgatcctgacaaaccaaccgatacgactgaggttaaaacttaccagtttactttaaacaaagttgatacgtcaagtaatcaattgactggtgcaacattcaaactttatgacgctgcaacagatggtaacgaaattaaagtcgtgaaagtatctgatggagtttatcgtgttgcagaagcaagtgaagaaggtactgaaattgaagcgggttcagctattatcaaaggtcttaaaggggatgatacgaaatattatcttgaagaaactaaagcgcctaacggttacaacattctgacagaacgtaaagaagtaacaatctcatcaacagaaacaaatacttcaaatgttatcaataaagctggtgcagaattgccttcaacagggtcatttggtactaaggtattctatcttgttggttcaatattactcattggtgccttaattttcatgatttcaaaacgtcgcatgaataatatgtaattttatcaaatagagttatcttcggaaggtttggcttaatcgctttttccgaagattttctctttaaatctagttctcatacttattgggactaagtttaaagagaggaacatacagagcacagagaagggaggtggtcagctgatgatctggctaaagcaaaaactttctaaattcgctttgccatttatttttatcatgggcttagggttactgacctatccgactatcagtgactactggaattcttttcatcagtctgaagctattatgtcatacactaaaagtgtgtccaagatgtcaacagaagactataaacgcattttggcaagtgccaagcagtataatgcaacgcatggtatggattggaatttttcagatgaggataaggcagcctatgaaaaagaacttaattttaacaatgatggttctatgggctacattgatattcccaaaattaacgttaagctgaccattttccacggcacagatgaatctgttttgcaaacgtctattgggcatttggagggaacttccttgcctgtcggtggaaaaggaacacatagcgttctatcagggcatcgtggtttgccatcggctaagttgttctcagatttggatcagttacgtgaaggggatacctttactattcatgttctcaacgaaactttgacgtatgaagtggatcagattcgtgtggtagaaccaacagatttatctaatttaaccattgatcctgaccaagattacgtgactttagttacctgtaccccatatggaatcaatactcaccgcctcttggttcgtgggcatcgtattgccaattctgatggtgatgcaaatgtcatatcagatgctgtgcagattaagccgatttatattgcaccatttcttgcgactcctatttgtgtcgttttactaatgtatatctttatcataacaagtaagcactaccgtaaaaaacacgccaaccgcgttgcgaattacttagctcaaaaagaaattaattatcgtccacaagttgatagaaatgtttataaaggtattattgagcaactaaaaaaattctttgaagatagttaaatgaattaggaaagctatataacgaacggactcaattgagttcgttttttatgttaataaatatctcaatatgataaatccatgttaagtttttctcataacattaacataggttaatgcgatattatttattttgctattttaagagcatattatttgtgctaattaaaaaaatgagataaaatcttgccagtgtgttataaataaaccttataacaataataaaatttatttataacaacacaatatttaccttataaaatccgtacatttacttatttttattaataaaaaagcaatgtaagcggcaattattaggtaaaacgaaaaataaattaatggagtttttgttgatgagaaagtttattagaattgcttttgcgttggtcataacgtttttagtaagtctatctgctattaatgtagctgctgaaacggatagttctactatttataaaggttacattaataatgcaggaaagagtagtgattctcgtatgagtattaaccacttatacgtagatgatgatggtaaagcagttgtcacttactgctttaatttccataaaaattacccacttagtagtggaacgccttatgaaaaatatgctaatgtaacttcagaacaaatgaaagctaatagtagcagcaatatggtggattctgaattgtatgatgctattatgaaagttttatataacggttatccaaataataacagtggtataaaagaaaagtatggcttaacagatgatgagtttagggctatcacacaatatgctatttggcattttacagataatacctatatttctgattcttatttccaaaatgcacagcgtcaaggtgcttattcagaactaactgatgttgcaaaccttacttatccagcggatttcaaacttaacttgtatattagccaagattcaactagacagaatctaatggcagcagaagtattaactgaaaatactgttgttaaagaatacacaagtgtatctgtcaataaagtttgggatgatgcaaacaatcaagatggacaacgttcaagtgaagttactgttcaattgttagcaaatggagtggaagtctctggtcagcaattagtgctaagtgatgccaatggttggaatggtacttttgaaaatcttgataaatatgactctgacaatgttcttattgattacactgtaaaagaagttacagatttatctggttatcaatctgtggtttcaggaagtgacaataactacactattacaaatactcatgttccagaggtaattaatttatcaggaacaaagacatgggatgacaataataaccaagatggtatccgtccagaatcaattgttgttcatctacttgcaaatggtgtagatactggtcaaactaaagaagtttcacaaactgataactggacttaccaatttgaaaatttaccgaaatatcaaaatggtcaagaaattgtttatactgtttcagaagacagtgttggtggttatgaaactatcatttctggatttaacattacaaacagtcacaccccagaaacgacagaagtgtctggaacaaagacatggaatgacaatgatgaccaagatggtaaacgtccagattcgattacagttaaccttttagccaatggaactaaggtagcttcacaagaagtaacagctgatacgaattggacatatacgttttcaaatcttgccaaatatgtaaatggtagtgctattacttacacagtaactgaagatagtgttgacaattacacaacaacaattaatggatatgacattacaaatagctacactccgggtaaaacaagtttgacagtcacaaaagtttgggatgatagcgatgatcaagatgggcttcgtcctaattctattgatgtccaattatatgctaatggcaaaaaatctggtgacgttgtgacgttaacagcagcggataactggacatatacatggacaaatcttgctgaaaaagcaaataaaaaagatattgtttactctgtcaaagaagtgactgaagttgatggctatacaactactgaaggaaaagtagagaacggaaatgtaaccattaccaatacgcatgtgccagtaattccagaagaaccagaggaccctaagacaacagatgtgacatttagcaaagttgaagttaacggtagcgccgaactcccaggcgcatcgctcaaagttgtttcaggtgaaaccgcagacggtcaaatcgccacagatgcaaaaacgggtgaaaacttagcgtggacttcaggtgatacagccaaagtgttcagcttgtcagaaggtacctacactatggtggaaagtcaagccccagcaggttatgaattagcagagtcaatcactttccgtgtcacagcagacggtcaagtcgaggtaaaaggaacagatggttcatggacagtccaagccgatgccacaatcaaaatggaagatgctaaaacaccagtaattccagaaaaaccacagtcaaataccccaacagttgatgatccaacaactccgtcaagtaattctgataaacaatcagagaagaaacaagaaaagaaatcactccttccgtcaacaggagatagcagcggtctaggattgatgatgcttggtctagcacttgtattatcagttatctttggttttgtttataaagccaaaagagctaaagcatagtattagttagtaattgaatccaaccttttaaaaaagagagccaatttggttctctttttgtgtttatctttgatattttaccgctttacttgtacttggctttggtctctcttgtggtctgtgttataataaaatcatggaaatatttgacacacatacgcatttaaacgccgatgattttgctgggcgtgaagcagaagaattggcacttgctaaagaaatgggcgtcactcgacacaacgttgtcggctttgacgcaccaactattaaacgtgctattgagttagctgaaaaataccctgaaatctacgccacaatcggttggcacccaacggaagcaggttcatatactcaagaaattgaggatatgattgttgccaatctatcacaccccaaagtgattggtcttggtgagattgggctagattatcattggatggaagacccaaaggacgttcaaattgaggtttttaaacgtcagattcagctttcaaaagaccataacctcccttttatcgtccacactcgtgatgcgcttgaagatacttacgctgtcatcaaagaagcaggcgttggacctcgcggcgggattgttcattcattttcaggttctttggaaatggcagagcgttttatcgagcttggcatgatgatttcattttcaggggttgttacctttaaaaaagcacttgatgttcaagaagctgcgcagaaattgccgcttgataagattttagttgaaacggatgcgccttaccttgcacctgtcccaaaacgtggtcgtgaaaaccgcaccgcttatactcgctatgttgtagataaaattgcagagctccgcggtttgaccagtgaagaagtggcaaaagcgacatcagataatgcaaagaggttgtttaactgtgactgaaaaaatcaaaattcaagaagtgcttgttgttgaggggaaagacgataccgcaaatttgcgccgtttttatgatgtagatacctatgaaacccgcgggtcagctatcaatgatgacgaccttgaacgtatcgaaaaattaaatgaccttcgtggggtcattgtctttacggacccagattataacggagaacgcattcgcaaaatcatcatgaatgctattccaaacgttaaacacgcttttttaaatcgtgatgaagctgcgccaaaatcaaaaagtaaaggtcgttcactcggtgttgaacacgcaagtttcgaagatttgcaaaaagctctttctggcgtattaggaaattttgatgatgataatcaattcgacatcacaagagctgacctaatgcgtatggggcttttaatgggaaatgatagccgcaggcgccgtgaatatttgggcgaaaagctccgcattggttacagcaacggtaaacaacttctcaaacgcctagagctctttggcatcactttagccgaagtagaagaagctatggagagatatgagggatgaaaaaagttgcgcttttacggggagttacgccagttgggcagaatcgtattcctaaaatggcttatctggcagagattttaacagaagcaggtcttgaaaatgttaagacatatattcaaagtggtaatatcgtttttgagacaaccttgtctgacgatgacgtttgtgcattgattcatgacacgattcaggcaaaaatcggtgctgatttatcggttatcctcaaaacgcaagcccagtttacgacggctcttgctgaaagtccctatgatgaaagctacgatgactcacgtgttcacttggtatttaccaatgaccagcttaaccaagagatattaaatgaactactagagatggattttggtgatgaaattttgaaagctggtagtgagtgcctgtacctctatttaccaagagaagcaaagaaaaagcgactgaataccaattaccttgaaaaacagttacatatcacagcaaccatgcgaaaacgtcgcagtattttgcgattgagccagatgtgatacaatagtaacttgcattgatagaaatgaaaggaaagacattccctaactaatgagggattattaattatgagaattgcagattacagcgtgacgcgtgctgtccttgagcgtcatggatttacgtttaaaaaatcatttggacagaactttttgacagatacaaacattcttcaaaagattgtggatactgctgaaattgacaagaacgtcaatgttatcgaaatcggtcctggtatcggtgctttgactgaatttttggctgaaaatgctgccgaagtcatggcatttgaaattgacgaccgtttaattccgattttagctgatacgctccgcgattttgataatgtaaaagttatcaacgaggatattttgaaatcagacctacaaagtcgtatcaaagaatttgctaacccagaccttccaattaaggtcgtggcaaatcttccttactacatcacaacaccaatcttgatgcacttgattgaatcaaaaatcccatttgcggaatttgtcgtgatgatgcaaaaagaagtggcagatcgtatttcggcagagccaaacaccaaagcttacggctcgttatcaattgcggtgcaatattatatgaccgctaaagttgcttttgttgtaccgcgtacagtctttgtaccagcaccaaatgtggattcagcgattttaaaaatgactcgccgtgaacaaccgctcgttcaagtcaaagacgaagatttcttcttccgtgtttcaaaaattagctttgttcatcgccgcaaaaccctttggaacaacctaacaagccattttggaaaagcagacgaaaccaaagccaaacttgaacaagcgcttgaaatcgcagaaatcaaaccatccattcgtggagaagctctctcaattgccgaatttgccaaattagcagacgccttaaaagaagtcggattataaaagtgaaccccagtcattattatggctggggttttaggttaatatcataaaaatggctttaggaccatagttgactaaaaaatgtaataaaatcggataataaatggattttgtccatttaaaaatcaatcccaaagaaagccccgttgggatatactgaatgaaatcaaaccatgaccaagatgaccagataacatgaacagaggcaaaacagatagcagacactaaaatatctaggtggtaacgtgaatgtttaaaataagttgacatgagaacaccacgataaaataattcttcattaattagcgcaacaatgccaccccaataaaatctcactagtaatacattttctgctgaaattatccgactctcatttaataattcttggtttaaagatatggggagataacagagaagcgcagctgaaagggcaagatttgctagagctagtaatacaacaactccaacatagtggctatgaaacttcactttgaaaaaagctctgccattttgtttcaataaatatcccactaataataagctcacaagggtgtaataagcacatagtagaatggttccatcgaaatcattaatggcatatttggtaacgatttttcctaacagacatgggaatgaacgaaaaaaggtgacataaaaaagaagaggataggcaagtagaagtttttgttgatactgatttgacacctgatatttctcctatcttactgtttataaacttttaaaagcaccaacacgatgtagatgaaataaatgcttgtatagattaatttttgttgataattgagaacgtttagtaatataaagcgtacccagatatcagtaactgccaataatgttaacagataaccatatcgttttatgaatttttccataatatctccttttgtatttattgagcaaagaaaataaaggcaataaggtgccagctcagataaatattccatgccatatgaacaagaattgatggataaatcgaacgtgtttttctaaaaagaatcgctaaaattaaaccaagaaaagcatagtttttaaatacctctaaactaacaccataagaaaatagatgagccactgagaacattacagcagatagtaagcaatctaagtaaaactttgatttctcaaaaaagctagtcatcaaaacaccacgataaactaattcttctaggattggtccgacgataaagggttgtaatgctaccaaaaacgcctgcggtgagtgacggaaaaatagtaaatcattctttatatctccaccaacaaataaaagtttattgaagtaggtgtatatcaccccaaaagcaagcaaaattaataaatagtctaaaggttttagcgatgttatttgaaatatttctggtcttcttcgtcttaggtatatcaccagtacgatagtaaatatgatggtaaaaatattaagaacagggtaatgataatctgttagtggtaaatcaagccgctctaaaatagtaaacattacaaacttcaatccaaatagatgacaatagataaaaaatattgccaatagttttggaactagtaagttctttagtttttctatcataagtactcctttaataagatagttacaggttattttatcagaatgtatcatctttttttatccaagtcataaaatgttgttttttagtcgtaaacagtcaaattttaaagaataatgaccattcacgactgatttttgctgtgtgatgacttagaaaaattaaagccagccatttattatgactggacttatcaaaaatcttttaatagcttgtctttgtaataattaaagaaagtttttttgccgatagtgctgattgttttgccttgtaaaccatattttaatttggagctatcttgtttatcaacggtggctagtgctgtcacctcaaagacatttccttctttggtttgtgtggcagaacttgcaattttactgattttgccagtgataacaatggcgtgattgctaattttttcaagggttaggcgaacagtctgtccttttttcaattgactaacatgagtggagtcaacgtaatagcggatagcgacttgctgtgttttggcaatatctgggtaaatctctgcaatctgactgccttgcggcaagagcgtttgcccttcaaattcatcagaaacatgtaaaatgccactttgactagcttttaaaacggtgtcagctttggagagatttgtctggtcaagctgcgcttgcaaattttctttttcttgagtaatttgcgtaagttgtgtttcagcttgtgtcaattcctgctgacgcaagctttcaatttgattagtggcactagtgtcgtaacttcccgttgaataattggaagcagcttgtgtttgcaaactagagatagaggcattaatgctatcaatctgcccttgtaggtctgttaaaaattgatttttaacgctttctttgctagcagaattgttgtcagttgaactgctttgtgtatcaattgtttgaatttggctaagatagctattaagagtagctgcatatggattattgccagatacgtttgttttatcagtttgaatagcatctttaacttcttgatattgactggcttgggtttgtaggttagcaatctgattggcgatagctgcatttgcttggttgacaccagcttcttgtttagcaactgattggtttgattgagaaacttgagcagtaattgtttgagattgatttaaaaaacgctcaacggttgctgaataaccaaattcatcatcacctgtaaaaaggttttgtccttgttttagactttctttcaattgattgagtgcttcttgttgacgttcatatctttcgatttgtgtttgaatggcattaagttgactatcttccaatttgtcggagtattggatgagtaaatccccctttttgactgccttattttcactaagattattggttaaaacggtgttattgctacttgattgaacaacagcgatgacttttgttggtctaatactaccaagtgtcgtaacggtaatttcttttttaccaatgagagaaaaggcaaggagaaaaaagacaaaaagtgtcattggaatcactaagatagtcgcaaaattatgataacgcctatgataaaattcagcagattgaaataatttaggattcatatggtctccttttattcatgaaataactgtgcatagaaaccttgattttggatgagttgtttatgatgcccttcttcgataacttgtcctttatctagaacaatgacacggtcagattgttcagcaatgctcaaacggtgggcaacaaaaataatagtcttgtctgtgagagatagtaaatttttaatcacacgtttttccgttagaacatcaagaccacttgtggcttcatctaaaatcaagacgggagcttgtgtcagtaaagcgcgtgctaaagctaaacgttgcttttgcccaccagataaaccagcaccatctgaaagttcggtatggtatgctagtggcatcgattcaatatcagcacggatttcagcgatttcacaagctttcagaatttcttcttgcgtgatattgtcaggtgctcccaaagttaaattttctaaaatcgtccctgaaaagacgtaagactgttgtggtaggtaattaatgtattggcgaatggcttttttatcaatggtttttaaatcgtagccaccaagggtaatctgtccatggttaggtgtgtaaaaattgacaatcattttagctaaggttgtcttaccagaaccgctgataccaactaggctaattttttcacccttcttaatgtgtaaattcacatgactcagtgtgtcacgaccaaaaccatatttataagaaacattatcaaagacaatatctccttgtagaaaatggctgtcatttaagagttgtctgccatcaaattcagatgacactaagtaaacttcgttgagacgattgttagctactttggcagattgtagtttggtttgcagattaataatattttccattggtgttgtaaagtacgacagaagcgtattgtaagtaatcaattgtcctactgaaatattcccagccatgactaaacgtgaaccataccagagaatggcgacgtttaaaatcagctgtgctccctgttttaacgacgtttgcacagcttcatacttactaagcgtaaaacttttatccaaataatccacaaattcacggtcaatattttgataacggacttcctcgctagtcaaagatttaatcgtttcaataccattgatatcttcgataatcgcagagctaaccatagaattggcttgcatgacatcgtgattcattcgctcaaaaggcttcataaaagccaaaataataatagcatagataggcaatgctattaaggtgatgaaaaaaagattggcattttgcagaattaagacacttccgacaataaacaaaatactcacatctaaaaataaagagagaatcgttgatgccagtgcatcaataatcgagttagcatcggtgaaacgtgagataacttcacctgtccgccttgtggcaaaaaaggacatgggcaattcaaaaatatgacgaatataagacaaaatcacgtcaattgttaaccgttggctcagcacaacaagtaaataattttgtgaaaagctcatgatttgttgcattatgtaggttacaatcaacccaaccgagacaatgccaagagtggattgcaaatgattaggaatataatcgtctaagattccttgcaaatagtaagacccaacaatattaatcaaggtcacgagcaaacttgccagaatgatataagttagcagtgccttttgtttgaaaataattggtaaaaagcttgttaagccatttttcttatctttatgtggttgataatgcggagcaggcgctaaaaagatagcaaccccagtccactctttggcaaaatgcgctttggacattttagtgaccccaacgctcgaatcagggtcaccgataataagataatcttttttggctttgtagataacatagtaatgcgggagtttgccttctttgttaacatgaacaataaaaggatagggaatatcagccatatcaaacagttccatattagcctgaatggcgcgtgtttcaaagccgattgctttagctgcctcaactatccctaatgctgttgtcccttccttagttgttttggctaattctctcaaatgagccagcgagaaatctgatccataatgcttggcaactgatgccaaagctgccacaccacagtctcgcaaatcaatctgactaacatatttatatcttctcataacctttcccttttaaaaatgaaactagaactattgtgccataaaacaagattaaaaaacgcccaagtcgtaaaaagtcaaaaataggtcgcaaacggtcaaaaaattatttttctttaccattcttccaaagaaaaaatctgattcggataaaaagatatgctcctaagatgagataggtaaatattaaaaataatgaaatgatagataatacgattgccacttgtcgattgatttcgatgaaaaaataagtaatccctagcagaagcaatgcaagtggtgcaagccaagaatcaaagacagttttcagcttttctaaaaacgccaaggtgcgtgatgaaatagtaaaaaatcgtgttagcatggtcccaatctcccttttttctcagtaacaattgttcattatgccataaaaataacattaaaaatgcccaagtcataaaaagtcaaatttaagtcgtaaacggtcaaaaaatcatgaaaatacaaaaaaatttaccatttacgacctaaaaacaacaaattacgacttgggcgtgcattaacctcacaatctgttagactaaaatctgtcagttgcaacgacaaaatattattgggaggtattcaaatgaatacaaaaacttttgaacaatttgatgtaatgacagatgaagcactttctaaagttgaaggtggttacagcaagacagattgtctcaatgcaatgattacaggtattgctggtggaattgtagctggtggtactggagcaggtctagtaacgttgggagtggcaggactacctggtgcatttgttggtgcacatattggagctataggtggtggggctacttgtgtaggtggtatgttgtttaattaattttataaggagagagtaatgagcttaaataagtttactaattttcaagagttagataaaaatcatttgcaaacaattagtggtggtaaagggaatatgggttctgctattggcgggtgtatcggtggagtattattagctgcagctactggaccaattactggtggtggggctgcaatgatctgtgtggcttcaggtatttcagcatacttatagaatttatgattataaaatatagtattattatttttgttaatttagtatgttatttattaattaacaaggtatttaaagcttcgaatgacgagcgagagacaactggtaaagttttattgattttatcaattgtttatattgtagtagatatcctgttcaatgcgtctaaatagctatttaaaaattttataatgtattactattgtgatagtcacacattttcaagctgatagattcctatcagcttttgttttaatcaaattttaccgttgacgacctaaaaacgacaaattacgacttggacgtgcattaaccgcacaatctgttaaactaaaatctgtcagttgcgatgacaaaaaattattgggaggtattcaaatgaatacaaaaacttttgaacaatttgatgtaatgacagatgacggaagtttttgtagatgaaaaattggagagctattctaaaaaatatactgtttttggcaatgggagcgaaggcagtattatcgacagacggtatgttagtaaaaggagttctcgttttcttcacaatgtttatattgtatagtataaataaagcaaattaatttctatgtactattctatttttgttattttattctgcattatcttagctataatttttattgacggtttctttattaagaaaaataataaagcctcatcttatatcatttttttgacttgttatgttttaagtcaaaaggaagctaatactagttttctgacgatagtctgtttgcttattttgctattgatatattatgaaaatagagataaaaaataataactattattgataatcagattcatatttttatggcaataatattgcctgaaagaataatttataatgtattactattgtgatagtcacacattttcaagctgatagattgcctatcagcttttgttttaatcaaattttaccgttgacgacctaaaaatgacaaattacgacttggacgtttatttccaagagaatttgttaaactgaaatggtcaatcgcggtgacaatcttaattaaaaggagattttatgaaaaagaacgttttaaaatcaacatttttattatctgcaactgttttatcaatggcaaccgtttctgtctttgctgatgatgagcttgtgcctacaactgaaacgacagaagttgtggataatggaaataatgttacagaaaatctagcaacagatattattgagccatcaaatgatatttcagaaagtcaatccgaaaaaactgaggaggaatcatcaattgaaacggctgataattcatcagttataatggaatcacccgaagcaacggaaacgatagcatcagacacatcagatgagctagaagaagctgaagtcactatttcccaatatgaagaaaatgtcgcagactttaatcacgttccaatgacagatgtttatgcgatgtttacagaggacggaaaagagcacgtgatttatgttggacgtccgacttgttactattgtcgtcagttttccccagctttaaaagagttcaacactttaatggataatcgtctagagtattacaatactgacagtcaggattttgatgaagaagcagcgaactttctttttggaacgattggtattccaggaacacctaccattatccgtttgcaaaatggtcaaattgtgagtgcgtggattggtggtggtatttctggacaagaactttatgactatctcttttatgggaaaatcccagcggctatggcagcagcaatggctgaacaatcaaatgaagataatacagaaacgatagcatttgacgctaaagaaataaaaactgattctaatattcagaatgtgatttttttaccgcaaaatgatgttaaaaccgctgaaaaagccttaattgttccagaaagcccacaagctttctctaaaaatgaaataaaaactaataacagcaacgccctacctaaattaggcattaaagcaaacaacttttcagcatacggactgttaatttctctattgggactgattttaatgaaacttggcagaggaaaagtagcaaatgaatgataaagtttgtaaaaatagtttatacacagctctcatatttgactttcttggaatatgcttaatgctgtttaattactttgtgtacaataaagatttttggaattcaacaacttacaatttattatttggtgggttgtttgtgttgcttttatgcaagaattattttaaaaaagataaaaaatagctattcgcgactaaaaattggcattttacgactttggcgaaaaaatcctcgaaaaagatatatactttatgtgtggacaagctaaagcgattagctaaacttgttcaaaataatattgaagcataaaggagactattatggtaactaaaatcgttggtgttgtgtgcttattaatagcagtatttcaattttataatacttataagttgcttactgacactagagcaaatggcaatgaaaacacatcgcagtttctgctggctagtttatggagtggcggtctatctgggattattctttttgttgttggattaggtttgttactcaatgtcttttaatcacttctctaatatggaaaaacaaaaattatccactagttgttagtgtgtttaatttttgttttttagtatatcagaatatcattttactatgttacaataaaaagtgaccgttcgtgaccttattttgtctgtttatgacttggagatttttttatcagtatttcctttataatgttattggagggaataatgatttatgaaatattttaaatttacaattaacaggcgagattataaattggctattgacgatatcctttttattcaagtctctaaggaaaaaattcatatggtcaaggtggtaaccgctgatgaggaatatcacatttatcatcaattaaaagatattgaaagagaatatcatcagttctttaggtgtcaccgtgatactttggtaaatagggataaaatacggataatggatagagagcagcgacttttatatgttggagatgaaaagcgacctgtacattatgcacgaagtaaaggaagtcaactaaaagaaatcatctcaaatgactgatttttagaggagatttatgttagatatttatgtactagaggataatatcatacagcaatttcgtatggaacgcgagattgcgaccattatggcaaaaaataattgggactatcagagaatagaggtgtttagttccgcaaatgagattatagctaaggcaactgaaaaaggagagcatcaaattttctttcttgatttagaaatcagagacgacgaaaaacaaggaattgatgtcgctaaagctattcgtgaaaaagatgcaacagctatcattgtttttgtaacaactcattcagaatttatgctgctgacctaccaagcgttagtaggggcaattgattttattgataagaacctgaatgaccaagcatttagtgaacgcatagagttgtgcctaaaggaagccatgaaacatcaaaatgataatttcggcgaaaactcctttttgtttgaaactcctaaagcacgtgtgcgcatgccatatagtgacattctctattttgaaacctctcctgctgtgcaccgcgtgattatgcatacgaaaaatgacagaatggaattttatgcaacgattgcagagattgctaaatcagacaaacgtcttttcaagtgtcaccgttcttttatcattaatgtggataatgtggtcagatttgataaagcgacacgaagtgtttatttcgaaactggggacacttgcctagtttctagagataaaataaaacctctattaaatgagatgaggtgaaaagctaatgagcaattatctaagtgaactagcttactatcctgtgattatgttgatttattctaatgttagaggagcaaagctgaaattgtgggaaatagtaacgatagctgttactttctttgtcattgatttcacatggttttacactattatcggtcgtattttaattttgatgcttctatcttatttgagagataaaaccttgcctttttctctatacgtattttatgggagtttcacttgggtcattgagagtattatcattaggacgattagtttttttattcttccaatattccatctcaattatattgacttgagtaaaagtgatggattgtttgtcattgtagaaattttagtagtaatcatatatttcttaatggtaaaactttctaaaattgattttcaaactttcattatgctgagcgaagtgaagaaactaagaaaaattctaatcttcactaatataactatggtattttattatataggcatagaattcttgactggggttgaatttcaaggaggagttccaactttactttatcgccaatggttagttattctttattttatcttttttgttttgatgttattttatatgaatcgctcttatcaaaattggcttgagaaagaagtatcattagcgcgagaacaagaactgcattctttgtcggtatatagcaagcaaatcgaaggcttatatgaagaactaagagcttttcgtcatgattatgctaatatcttagcgagtttaaaagagggaattgaccaagatgatatgagcatggtgagaaatatttataatgccgttttagaggattctggaaagtttattcagcatagtcgcttcaatattggccgattgactaatattgataatgatgcgataaaaagccttttatcagctaaatttttagaagcggaatctcatcatattgaggtagaattagaagttaaagataaaattggagctccagatattcctttgttagattatgtgcggctcgtctccattttatgtgacaatgcgattgaagcggctattgaagctgaaaagcctgccatggttattgcttgtttctatcaaggggatgactatttactaattatcgataacaccacaaaagaagagcgagttcctgtggaattgatttatcagaagaattattcaagtaagggctttggacgaggtgttggtcttaaaacggttaaccagatgttgaaaaagtatccaaatatgtcggtacaaacatcaagtaaaaattatcattttagacaaacaatacgaatcaaaaaatcattcgactgaaatagtcgaatgatttttggtttaagtttgttttttaggtttgttgttaaagttttttaaccaatcgaaaggtccaacaattaagaaatccttattctttccaccaatcgttttctctaattcagattgatttaattctttaaacattttttctgtcatcatttttataaacctccttagtgcttaattgtagcagaaaagttcttaaaagctttttctaagtcataaaaagtcatttttcggtcgtaaacggcaagtattaaaaaataaccattcgcgactaaaaaacaacgttttgcgacttgagtgttcgttatgagttgaaaaggagtataatgtaggcgtgttaataggaaatataagtgaaagcaggtgattgtcatgtcagtggcatcagtaaaacgattgattaaaaagattgtttttccaacctatacgcatgaaaaaatctatgttatcgaccagacaaatctgacaaaaaagttgcagttttcgacgacgttgaaacctttgggaaaatggtacatcacaacgggaaatcattggctttgtcattctgaattgactttggatgactttcaaaaaaatttcattcaacaagctcaagtctctgctgacgaagctcaaaagctagaatttacgacagattacctgccattttctgaaatattgggattatagggagtatttatgataaaaacattattttcacagtataaaacagcggttttggttattggcatcattttgttactaaccgtttatccgcagatttttaaaataatttacatgtctggacgcgactttggtcgtagtcttgtcaatgctttattgccttagaaggagacattatggcaaaattagtaaaagaagagttgttaaatgaggtttatgaccttgtcttgtctgttgacatcaaagacgaagaacgtcaagtactactaactttcaaaaatgcggtagaagctggtcaggattttgatagagctgtgatgtctttggcatctgatttacgccgaatcggtgttgcaaatattgccaagaaaacaaaaatgagcgcatcggtgaacactttttatcaaaaaatcgcgacatatggagaatttgaaaaaaatctcggacgtggtctcatagctatgggtgtcgtgggcggtggtcattgataactttagtataaaaaataatagaaaacatcatcacgacacttgggaaagcttgtcaatacagcaattatcaaacgatgattgcaagcatttattttcaaaattgttactgctgtgccaaaaaggcaggtaagtcataaaacgccttaactgacaattttgacctttcacgactatttttggtcatttcatgacattaaatgaaattatcactcaaaaaggattatagtaattagtggttattaaataactttctgatgtgagggaatcgtggagagatgtgaaaaatttttcttgagcagtttgccaagtgttcttgatgatttagattttcagggagaaaagatgaaaaaaatagttaaaaatccaatattaaatagcttgataataggaatgggagctggtgttgtagcagctttgctcggtactcgctttctgccatattacgtagtcgctttactcattgtcacctttattcgtagagtttcttttgactaactaatattacctaacagcgagctaataagcaggtatttggagggagatttatgccgaatttaaagtggttttctgggggaaaagaaagaagagacgaagcattaatcatcattgatgatttgctagcaactcttgataacaatgtgaaaatcaacccgttacgacaattattgcaatcttatcatgaagaattgaaaaatagtgggacgtcaacgccctatattttaagtcgtttaaatgttgatttatcaactgttttggtggaaaatgctattcacccaacaagggaacaatcggcgaaactaaaagagttaagagcacttcaaaacatcagaatactgtaaattctctatcaatgtgatagggaatttttgatatgttacaataagagggagatcatttcatgtttagaaagcaaagttactgtttaggagagaagaaaatgattgatatttatgttttggaagatgacgtaaatcagcagtttcgcttggaaaaaatgattgacgaggtgcttgtggacaatcagtggcaacatcgttgttttgaattgtttggtgagcctagtcgtcttatcactcttattgatgaaacggttcctcaaatctttttcttggatttggatatcaatggcgataaaacgaaaggaattgaagttgccaaggcgattagagacgtttcgaaaacagcaacacttgtctttgttacaacgcattctgaatttatgctcctgacctatcgtgcgcaagtcagtgcccttgatttcattgataaaactgacagtgacttggcaatcaaggaaaatttgcaggcttgtttaaagaaagtcgttgaaggacaagtgcctcgcctaagcttggatacctttatttttgaaaacaataaaactaaaatcagaataccatttgaagatattctttattttgaaacggcggaagcgcaccgtttgatgttggtgacacggacaggacagcgtaatttttacggaacaattagagaagttaaaaaggcaaatcataagctatttcaatgccataaatcctatctgattaatcctgataatgtcgtcagtttggataaaaaagaagggcttgtttattttgtaggtggaaaatcttgctacgtttccaaaaaacacatgaaagaattaaaaactaaactagaaagttagagtggagaagttttggatttaaggagtttaattgcgtttttagaaacctttgtcacgtttttggggtatgctatcctatttaagagcattaccaagtaccgacttgccgtttgggaatggctagtatctgttttagtgttgccaattcttgcatcaggctttgcggttgtcatgcttttgtgctttgcggatatggacggtttcaaaactgtcatgattaaaaatattgtggtgttgttgtggtttaccaccttatcttaccgtcatgataggtccttgctaccaaggtatcatattttttatgggcttttcccagttgcggtagaggatattttgcttaggacggtgtcttattcattagcagcgctattttccacaagaatcaatgctatcggacagtcatggattgctcatgttgacatctggacacccgttccgatttattttatggcttcaaaattactggaaattgatatttcaaatgtcaaaaagaccttgcaaaattaccttagctcgacaagtcttatcttgattaatttgctaatggctttctatttttttggaatagattatgtcgctttgaaaagtccatttggtagcgtaggtagtgaatcgtttagagaaagagttacttttgtttacattattcttctttttctatttttgttctatctgaattacaaatacgtccgtgaacaagagatagaattacaaaggcagcaggagctagaattaatttcgctggaaaattacagtaaacatgtggaaagtttgtaccaagaggtcagaagtttcagacatgattatgccaatattttgttgagtataggagaaagtatcgagcgaaatgacttggaaactatcaaaaaaatctacaatgacattactaatgattctgagaagttcgtcaaaaatagcaaattcgatttgacacgcttgtctcatatttcaaatagtgccatcaaaagtttgatgtctgctaaatttctagaggctgaaaatctcggaatcaccattactttggaagttcctgaagtcgtggagtgtcccaaaattccacttattacctacattcgcatccttgctatcttgtttgataatgcgattgaagccgcggtgttatcagatgttcctaaaatatccgtagcgaatttttatcaagatgataactttgtttttatgattgaaaattcaaccaaagaagatagtattccgattgataatatttatcaaaaaggctattcaagcaaaggagacaatcgtggtattggcttagcaacagttagtgaatttcagcaagaatatgacaatctctccattgaaacaagcagctcaaatcacctctttagacaaattttgagaatctatgaatcctagcaatatggtgcattagaaatgttacgttttttctggtaaattcaacaaaaaacttgcatcatttcaataaaagtatatactttatttgaatgcacaattaacaaaccttcaaatgaaaagaggtaaattctatgttagaagttttagctggtattgcttgtttattgttagctgtttatcaattatttacagcttacaaattgtttgacaacacaaaaaaacatggtaacaaaaatacgtcaccatttcttttgaatagtttgtggagtggagctcttataggtattatcctactatcagtaggtactggtcttattgttaatattttttaaaaaattgtgttattcaatgcccaatagggtatttttttaaaactttttacgaataatatagatagagaggcagctaacagcttttcaaccaaattcttccatcacgtttaacaacgtactctttgaaattagaaagggagtgagataaataaagtctccagtggagactttattcatgagcctagaaattaaaaagcgaatcagtagtttcgcagaaattcgatttctcagcaagtcttaatttcttgttgctgacttaaaacggtctatccccagaccgtttttggttttatttcccgattataaaggttccccgaacctttataactcacccccgcatggctcgaaagatttggggaaccttttgaggttggaaatgaagtcaagcgtagcttgatgtcaaatgggttgtaaaagctgatttatcagcgcattagaagccactcagcagtgattgattgctcaaacaattgagaattgtttgaggttggaaatctagcttgcaaagcaagcgtcaaaaagtgcctaatcaattgtgcatgggaaactctaagttgactaaagttggtaatcgctgttttaatattttttgacagcgaccttcaacaatctatccccagattgttgaagtccaacccactgcgtcttgtaaataataactatgtaaacaaagaagctgagcaccttttgctccagcttctttatttgttataaggaaaggacgggatttgaacccgcgtgtgaataacatccacttgccagatttcgagtctggtgccgtaccaagctgggccacctttccaaatgtcgtatttaagcgttgtttgatttcaaatgataatgttgctcaaaataccatgcggaaaaagggatttgaaccctcacgcccataatgggcacatgcgcctgaagcatgcgtgtctgccgttccaccacttccgcaaaagacaaagtcattatacgacttttaatcaaaaaagacaaacatgagaaatcttttgagctaggtactgaataaaagggcattttttgctataatgagactatcaattataaaaaggaagtacatttgcaaggtagaattatcaagtctctagcaggtttttactatgttgaatctgacggagtcatttatcagacacgtgcgcgtggtaattttagaaaaaaaggtcaaacaccttatgttggcgattttgttgaattttcagcagatgaccattcagagggctacattttagcgattcatgaccgaaagaatagtttggttcgaccaccgattgtcaacattgaccaagcggttgtcatcatgtcagccaaagaaccagactttaatgccaatttgttggatcgttttttggtcttattagagcacaaggcgatagaaccgattgtttatatttcaaaaatggatttagtgataactcctgatgagataagggcaattcaaagacaatatcaagaaatcggttatcaattttgcacgtctttggaagaattgcttccgctattgaccgacaaagtgactgttttcatggggcaaacaggtgttggtaaatcaacattgttaaataaaattgctccagaactcaagttagaaacaggtgaaatttcggacagtcttggacgtggtcgccataccactcgtgcagttagtttttacaatgttaatggtgggaaaatagcagatacgccaggattttcatcgcttgattatgaaattacgaatgccgaagatctcaacgaagcttttccagagctaaggcaccttagtcattactgtaaattccgttcctgtacgcatacgcatgagccatcatgtgcggttaaggaaggcttagaatcaggcgacctttggcagtcacggtatgataattatctccaatttctcagtgaaattgaaaaccgtcgtgaaacgtataagaaagttataaaaagaaagtaggtacttatgtcaaacaataaaatcgcaccatcaattttagcagctgattatgcaaatttcgcttcagaattaaaacgtatcgaagaaacaagtgcagaatatgttcatatcgacattatggatgggcaatttgtaccaaatatcagttttggtgcagatgtcgtggctagcatgcgtaaacacagcaaactcgtttttgattgtcaccttatggtggttaatccagaacgttatgttgacgcatttgcgcaagctggtgcagatattatgacaattcatgcggagtcaacccttcatattcatggtgctttgcaaaaaattaaagctgcaggcatgaaagcaggtgttgttatcaacccaggaacaccagtttcagctattgaatctgtcttgagtttggttgaccaagtgcttatcatgacagtcaacccaggatttggtggacaagccttcattcctgaaatgcttgaaaaagtggcaaaagttgctcaactccgcgatgaaaaaggctatgattttgacattgaagttgacggtggcgttgataataagactatcaaagcttgttatgatgctggagctaatgtctttgttgctggttcatatctctttaaagcaagtgatttagctgcacaagtagaaacattgcgtgtggcattagatgactaagatagctgtctttgctggcggtcgtttgtcagatttttcgactgattttgagctttttgtcggtgttgaccgtggtagtctttccctattaaaaaatcaattacctttagatttggcagtgggagattttgattctgtcagcaaagaagaattacaaatgattcaagaagaagctggcgatttcatcaaggctgctccagaaaaagacgacacggacacagagttagccctaaaggcgattttctcaaaatacccacaagcacaagtgacgattttcggcgcttttggcggtcgaattgaccacatgatgtccaatctttttctaccaagcgacccagaattagcacccttcatgcgtcagataaccctacgcgatgagcaaaataccgtgcagttttatcctgcaggttctaatcaagttttgccagaaaaagaaatgatttacgtttcttttatggctgatggtgacgctgatttgaccattaaaggtgctaaatacgagcttgacgccagtaattttttcaagaaaaaaatctattcaagtaatgaatttcttgaccaaccaattacagttaccttaaaatcaggctatcttatcgttattcaaagtaaggataggtaaaatgttaattattacattattattaggacttcttagtgtcattttgctgatttatcttttgctgaaaatggcaaagctgacagaagatgtttcacaaaaactggacgacaacgctgataatttatctgaccaagtctcatatcagcttgatttagcgcaaaaagaccaagttttagcgttgaataatcagataaatcgtttgcaaaatgatttatacacacaattaaatgatattcgcgatgttcttcatcaaagtttgaatgaaaatcgtgaccgttctgaccagcgtttagaaatcatcaaccgcaatttgacaaattctgtcaaagaaatgcaagaatcaaacgaaaaacgtttggaagaaatgcgtcaaacggttgaagaaaaactcgaacaaaccttgcaaaatcgcttgaaagcctcatttgagacagtttctaagcaactggagtctgtcaatcaaggtttgggtgagatgaaaaatgtcgcacaagatgttggcaccttaaacaaagtgctttccaatactaagacacgtggcattcttggtgagttacaactggggcaaattatcgaagatattatgacgcctaaccaatatgaacgagaatttccgaccgtttcaggctctagtgagcgtgttgaatacgccataaaacttccaggaacagatgatgacggctatgtttatttgccaattgattcgaaattcccattggaagattactatcgcttggaagatgcttacgaaagtggtgacaaagaacaagttgagctttaccgcaagtcgcttcttaacagcatcaaacgctttgctaaagatattaataaaaaatacctcaatccacctgagacaactaattttggaattatgtttttaccaacagaaggtctgtattcagaagtggttcgtaatgctagtttctttgatagcttgcgacgcgatgaaaatattgtcgtagcaggaccgtcaaccttatcagctctactaaattcgcttgctgtcggcttcaaaactctcaatattcagaaaaatgcaaacgatattagcaaaattttaggaaatgttaaggtagaatttgaaaaatttggtaatatgttggtcaaagctcaaaaacaaatcaatactgccaataacactttggatagccttatttccacaaggacaaatgcgattattcgagctttaaatactgtcgaatcttatcaagaccaagcaacggcaagtttacttaacctcccaccattagaagacgaggaaaatcatgaaaattaatcaaatgaaaaaagatgaactctttgaagggttctacttaataaaatccgcagagcttcgtaagacgagagctggcaaggattatatcgcctttactttccaagatgatactggtgaaatttctggtaatctttgggacgctcaaccctataatgttgaagaatttgtcgctggcaaagtagtgtacatgaaaggtcgtcgtgaggtctataatggaacacctcaagtcaatcaaattacccttcgtaatccacgtgagggtgagccaaacgacccaagtgacttccgagaaaaatcaccagttgacgttgttgatgtcaaagattatcttgagcaaatgatgttcaaaattgaaaatgctgtttggcaacgtgttgttcgtgcgctttatcgcaaatacgacaaggaatttttcacttatcctgcagctaagacaaatcaccatgcttttgaatctggattagcctaccatacagcaaccatggtgcgtttagcggatgcaattggtgatatctatccacaactcaacaaaagtttgctttacgctggtatcatgcttcatgacttggcgaaagtcattgagttaactggtccagacaataccgaatacactgtacgtggcaatttaatcggtcacattgctttgattgatgaagaaatcacaaaagttctcacagaattaaacattgatgacaccaaagaagatgttatcattttacgccatgttatcttaagtcatcacggtttgcttgaatacggcagccctgttcgtccacgtgttatggaagcagagattattcatattatcgataatatcgacgccgaaatgatgatgatgacaacagcattgagtcgtattgacgagggtgaaatgacaaatcgtatttttgcaatggacaatcgctcattctacaaaccaaaattataaaaagcaataaaaagcagaacattttaacattactcacttaaaaatccctttacattagggaaaaacacaaaaaatggacattttttattaaaatgttcgtttttttcgccttcttatgatataatgacaaaaaacagatatgaaaatggagaaattatgaaattacgacgtagtgaacgcatggttgtcatctccaactatttgattaacaacccctataaattgacaagtttaaacacatttgctgaaaaatatgaagcagcaaaatcttcaatctctgaagatatcgccattatcaaaaaagcttttgaagaatcaggaatcggcgaaattgaaacagttacaggggcgagcggaggtgtcatttttacaccaggaatctctgatgaagaagctaaagcagtcatcgaagaattacgtgaccgcctttcagaaagcaatcgtattcttcctggaggttatatttacttatcagatttattaagtacccctaaaattttacaaagtgttggacgtatcattgctaatgctttcaagggaaataaaattgatgcggttatgacagtagcaaccaaaggagtgcctttggcaaatgccgttgcaaatatcttgaatgttccatttgtcatcgttcgacgtgaccttaaaattacggaaggttcaaccgtttctgtcaattatgcaagtggctcaagtgaccgtattgaaaagatgttcttgtctaaacgtagcttgaaaccaaatagccgtgttttgattgttgacgacttcctcaagggtgggggaacgatttctggtatggtcagtcttttgaaagaattcgatagtactcttgtgggtgtcgcagtctttgctgaaaatgcccaagaaaaacgtgaccgaatgacttacaaatcacttctaaaagtttcagaaattgatgttaaaaacaaccatgtcaaagtagaaattggtaatattttcgattaaaagagggggttccctctttttttctttgaatgttatattgcccaagagtgtttaatcttgactataataatttaatagctgccaaaaagttttataaaagctataaaatacggtgaaatcatttgacagacggtgcaagttgtgttatcataatgaacggtactttttacttttggtctctccagagtgtacagagacgtgctgacaaatgttgcaaagtacacattttagataaggactgtcaccaagtaccttatcaaccaaaataaaaaatcttacaggagaaaagtagatgcctacaatcaaccagttggtacgtaaaccacgtaaatctaaagttgaaaaatctaaatcaccagcacttaacgttggttacaacagccacaaaaaagttcaaactaacgtatcttcaccacaaaaacgtggtgttgcaactcgtgttggaacaatgacacctaaaaaacctaactcagcccttcgtaaattcgctcgtgtacgtttgagcaaccttatcgaagttactgcatacatcccaggtatcggacacaaccttcaagaacacagtgttgttcttatccgtggtggacgtgtaaaagaccttccaggggtacgttaccacatcgttcgtggtgcacttgatactgcaggtgttgctgatcgtaaacaaggccgttctaaatacggtgctaaacgtcctaaaggataatagaagggggataagaaaaaatgagtcgtaaaaatagagcgcctaaacgcgaagtattgccagatccattatacaattcacaacttgtaacacgtcttatcaaccgtgttatgcttgatggtaaacgtggtacagctgcatcaatcgtttatgatgcatttgaacaaatcaaagaagctactggaaacgatgcacttgaagtattcgaaacagctatggaaaacatcatgcctgttcttgaagtacgtgctcgtcgtgttggtggttctaactaccaagtcccagttgaagttcgtccagaacgtcgtacaactcttggacttcgttggttggtaactgcatcacgtgctcgtggtgaacacactatgaaagatcgtcttgcaaaagaaatcttggatgctgctaacaacactggtgcttcagttaaaaaacgcgaagatacacaccgtatggcagaagcaaaccgtgcattcgcacacttccgctggtaatctgcgatatactgatacaaagcttcgaatacaattaaacctttttactactggtattcaggctgtgtttagcaagtgttttgctcgctaacatgtatcaaatttaataaagcatgtttagaacgggtaggtcctgcctatccgttctaaaagtatgctataatagagtagtaaattaaatttatacataggagaaaaaaatggctcgcgaattttcacttgaaaaaactcgtaacattggtatcatggctcacgtcgatgctggtaaaacaacaacaactgagcgtattctttactatactggtaaaatccataaaatcggtgaaacacatgaaggtgcttcacaaatggactggatggaacaagagcaagaacgtggtatcacaatcacatctgccgctacaactgcacaatggaaagactaccgtgtaaacattatcgacacaccggggcacgtggacttcacaatcgaagtacaacgttctcttcgtgttcttgatggtgcggtaacagttcttgactcacaatcaggtgtagaacctcaaactgaaacagtttggcgtcaagctactgaatacggtgttcctcgtatcgtattctcaaacaaaatggacaaaatcggtgctgacttcctttactcagtaagcacacttcacgatcgtcttcaagctaacgctcacccaattcaattgccaatcggttctgaagatagcttcaacggtatcattgacttggttaaaatgaaagctgaaatctatactaacgaccttggtacagatattcttgaagaagatattccagctgaatacgtcgatcaagctaacgaatatcgtgaaaaattgatcgaagcagttgctgaaactgatgaagaattgatgatgaaataccttgaaggtgaagaaatcactgaagctgaattgaaagctgctatccgtaaagcaactatcaacgttgaattcttcccagttctttgtggttctgccttcaaaaacaaaggtgttcaaatgatgcttgatgcggttatcgactaccttccaagcccacttgacatccctgcaatcaaaggtgttaacccagatacagacgaagaagaagaacgtccagcgtcagatgaagaaccatttgcagcccttgcattcaaaatcatgactgacccattcgtaggtcgtttgacattcttccgtgtttactcaggtgtattgaacagcggttcttacgttcttaacacatctaaaggtaaacgtgaacgtatcggacgtatccttcaaatgcacgctaaccaccgtaacgaaatcgaaacagtttacgctggtgatatcgctgctgccgttggtttgaaagatactacaactggtgactcattgacagatgaaaaagctaaagtcatccttgaatcaatcgaagttccagaaccagttatccaattgatggttgaacctaaatctaaagctgaccaagataaaatgggtatcgctcttcaaaaacttgctgaagaagacccaacattccgtgttgaaactaacgttgaaactggtgaaacagttatctctggtatgggtgaacttcaccttgacgtccttgttgaccgtatgaaacgtgaattcaaagttgaagcaaacgtaggtgctccacaagtatcataccgtgaaacattccgtcaagctactcaagcacgtggattcttcaaacgccaatctggtggtaaaggtcaattcggtgatgtttggattgaatttactccaaatgaagaaggtaaaggattcgaattcgaaaatgctatcgtcggtggtgtcgttcctcgtgaattcatccctgcagtagaaaaaggtcttcaagaatctatggctaacggtgttcttgctggttacccaatggttgacgttaaagctaaactttacgatggttcataccacgatgtcgattcatctgaaacagccttcaagatcgctgcatcacttgcacttaaagaagctgctaaaactgcacacccagttattcttgaaccaatgatgcttgttacaatcacagctccagaagaaaatctcggtgacgttatgggtcacgttacagctcgtcgtggacgtgttgatggtatggaagctcatggtaacagccaaatcgttcgtgccttcgttccacttgctgaaatgtttggttacgcaacagttcttcgttctgcaactcaaggacgtggtacattcatgatggtatttgaccactatgaagacgttcctaaatcagtacaagaagaaatcatcaagaaaaattctggtgaataatttttgatagaaaggatgctcaaaagagcgtccttttttattatgaaaacggtaataatatttgcaattttggcgaaatagttatataatactaacgttgaaaggttgatttgtgcctacgtaagttaatcttttcacaattgtctaaaagggaaaccttttaaaataaaaattttttttgattttcataaggaggaaatcactaatggtagttaaagttggtattaacggtttcggtcgtatcggtcgtcttgcattccgtcgtatccaaaacgttgaaggtgttgaagtagctcgtattaacgaccttactgacccagctatgcttgcacacttgttgaaatacgatacaactcaaggtcgtttcgacggtgatgttgttgttaaagatggtggttttgaagttaacggtcaattcgttaaagtttctgcagaacgtgacccagaacaaatcgactgggctaacgatggtgtagaaatcgttcttgaagcaactggtttctttgcaactaaagctgctgctgaaaaacacttgcacgaaggtggagctaaaaaagttgttatcacagctcctggtggatcagatgttaaaacaatcgtatttaacactaaccacgaaattcttgatggtactgaaacagttatctcagctggttcatgtacaacaaactgtcttgcaccaatggctgatgctttgaacaaatcattcggtcttaaagttggtacaatgactacagttcacggttacactggtgaccaaatgactcttgacgcaccacaccgtaaaggtgacttccgtcgcgcacgtgctgctgctgaaaacatcgttcctaactcaactggtgctgctaaagctatcggtcttgttatcccagaattgaacggtaaacttcaaggtcatgctcaacgtgtaccagttccaactggatcacttactgaacttgtttcagttcttgacaaaaaagtaactgctgaagaagttaacgctgctatgcaagctgctgcaactgaatcattcggttacaacactgacccaatcgtttcacgcgatatcgtaggtatctcattcggttcattgtttgacgcaactcaaacagaagtaactgaagcagctgatggtactcaattggttaaaactgtttcatggtacgacaacgaaatgtcttacacttcacaacttgttcgtactcttgaatacttcgcaaaaattgctaaataatcaatgagttagctgaagaagagaggattcgttcctctcttttttgtatattgtaaaatgatacagaaattcacaggtttcctcgtttagtagtggctggcgtacaaaatgtactgattttgctacctcttttacaggttttgtgatataattagcatgtataaaaaataataaggagtcctatcaaatggctaaattgactgttaaagacgttgatttgaaaggcaaaaaagttcttgtccgtgttgactttaacgtgcctttgaaagatggcgttatcactaacgacaaccgtatttctgcggctcttccaacaatcaagtacatcatcgaacaaggtggtcgtgcaattcttttctctcaccttggacgtgttaaagaagaagctgataaagaaggtaaatctcttgctccagtagcagctgatttggcagctaaacttggtcaagaagttgtcttcccaggtgttacacgtggtgctgaacttgaagaagctatcaacaaccttaaagacggtgaagttcttcttgttgaaaacactcgttttgaagatgttgatggtaaaaaagaatctaaaaacgatccagaacttggtaaatactgggcttcacttggtgacggaatcttcgttaacgatgcatttggtactgcacaccgtgcacacgcatctaacgtaggtatctctgcaaacgttgaaaaagctgttgcaggtttccttcttgaaaacgaaattgcatacatccaagaagctgttgaaaaaccagttcgtccatttatcgcaatccttggtggttcaaaagtttcagataaaatcggtgttatcgaaaacttgttgaagaaagctgataaagtccttatcggtggtggtatgacttacacattccttaaagcacaaggtattgaaatcggtaactcacttgttgaagaagacaaacttgatgttgctaaagaacttttggctaaagctgacggtaaattaatcttgccagttgactcaaaagaagctaatgcttttgctgattacactgaagttaaagatactgaaggtgcagcagtagatgctggattccttggtcttgatatcggtccaaaatctatcgctaaatttgacgaagaattgactggtgctaaaacagttgtttggaacggacctatgggtgtgttcgaaaaccctgatttccaagctggtacaatcggtgtaatggacgctatcgttaaacaaccaggcgttaaatcaattatcggtggtggtgactcagctgccgcagctatcaaccttggtcgtgctgacaaattctcatggatttctactggtggtggagcttctatggaacttcttgaaggtaaagtacttccaggtcttgcagcacttactgataaataataatttcttcgttaagaagattcaaaaggacggtcttgccgtccttttttgtgtgtaaaatccataaatgagaagaaaacattttattgcttaaaagtggtactattattttgttttgtggaattcaagtgagagatattttgtggtaaacgcattcatattggtggaacgctcacaaatcaatttgaaaatatgttaaaataaagaaaatgcaaattggttgtgagttatgaattatttaaaaaatcttttatcgaattataagtttgacccgagtaaatttaaattgggcatgcgcacctttaagactggtttagctgtttttttggttttattaattttccatttatttggatgggaagggctgcagataggaacgctgacagctgttttcagtttacgtgaaagtttggacaaaagtgttcattttggcttctcacgtgtggttggaaatagtgttggtggtttgctatctttgctcttcttttttatcaatcaatttttccataatcagttttgggtaacgttgatttttgtcccaatttttaccatgttaggaattatgattaatgtttcaattaataacaaagcagggatcattggtggaacatcggcgcttttgattattaccttatcaattcctgctggagatactattttatatgtatttgctagggtatttgaaacattttgcggagtctttgtagctattcttgtcaattctgatgttgataagattagggggcttttacgcaaaaaaagctaaaaatttttcgtttatgtcatattttcttacataaggggttgacagtttagaattttcagactataataagtgtcggaaggaggtcatcatgaaagaaaaagaactcagacgttcaatggcggtatttcctattggaacagtaatgaaattgacggatttaacagcacgccagattcgttattatgaagatcagggtttaattaccccagagaggacgtcgggaaatcgtcgtatgtattcgttaaacgatatggatcgattgctcgaaattaaagattttcttgatgaggggcttaatattgcggctattaagcgtgaatatgcggagcgacaagataaagcacatcagaaacaaaaatctttaactgatgctgatgttcgtcgtatcttacaagatgaactccgtaaccaaggtcgtttttcggccccatcacagtacattagcaactggcgcatctaaaaatacgcgccgctcggttatttcggttttaaaaaggagaccttaattcatgactattacagcagctgacattcgtcgcgaagtcaaagaaaaaaatgtaactttcttgcgtttaatgttctcagatatcgctgggacattgaaaaacgtggaaattccagcaactgatgaacaacttgacaaagtattggcaaacaaagcaatgtttgacggttcttcaatcgaaggttttgttcgtatcaacgaatctgatatgttcttacatccagaccttgatacttggacagtattcccttggggtggtgaaaatggtgctgttgcaggtttgatctgtgacatctatactgctgaaggtgaaccatttgcaggtgacccacgtggaaacttgaaacgtgctcttcgtcatatggaaaaagttggtttcaaatcatttaaccttggtccagaaccagaattcttcttgttcaaattggatgaaaaaggtgaagcaactcttgaagtaaacgaccgtggtggttacttcgaccttgcaccaactgaccttgcagataacactcgtcgtgaaatcgttaatgttttgactgaaatgggatttgaagttgaagcaagtcaccacgaagtggctgttggtcaacatgaaattgactttaaatacgctgatgttttgaaggcttgtgataacattcaaattttcaaacttgttgttaaaacaattgctcgtaaacatggtctttatgctacatttatggctaaacctaaattcggtatcaacggttcaggtatgcactgtaacatgtcattgttcgattacgatggaaacaatgccttctacgatactgaagatccaaaaggtatgcaattgtcagaaacagcatattacttccttggcggtttgatgaaacatgcttataactacactgcaatcatgaacccaactgtaaactcatacaaacgtttggttcctggttatgaagcaccagtttacattgcatgggctggacgtaaccgttcaccacttatccgcgttcctgcatcacgtggtatgggtactcgtttggaacttcgttctgttgacccaactgctaatccatatcttgcacttgctgtccttcttgaagcaggtcttgacggtattgaaaacaaaattgaagctccagctccagttgaatcaaatatctatgtcatgactgaagaagaacgtaaagaagcaggtatccgtgaccttccatctactttgcacaatgctgttaaagctttacaagaagatgaagttgtcaaagcagcacttggtgaacatatctttgtaaactttgtggaagctaagaaaattgaatggtcaagctatgcggcctttgtttcacaatgggaaattgataactatctagatttatactaagaagtagtaaagagacagcttctggctgtcttttttttaccaattaaccacattagcagttagaaaagttcaaataagaactattctaatctagcataatgtggtataatttaaaataaatattctgaataattagactattttggactatttgtactaatgataggagtagaagctatgaatgaaagtgctttgagagcgcaacagacaacgctttgggatccatcttttgaatcggatgcttgtggtatggggtttgttgcacagcttgatggtaaagccagccatactttgattgattatgccttaaccatgttaactcgtatgaatcaccgtggaggtacaggtgcagaacctgatacaggagacggtgcaggaatgttgcttgctttgcctgatgaatttttccaattaaaagctaaggaagcaggctatgttttgcctaaaaaaggcgattacgccgttgcacaattatttttacctcaggatactgaagctaaggtaagtcttttggaagctgttaaagctgaaattaaattagcaggttttcatgtcttgatgacacgtgatgtgccatttaattacgataattgtggtccagcagcccaagaaattatgccaagttttgtacaagtttttgttaagaaacctgatgacacaaaagctggccgtgattttgaggataaattgttccgcttacgtcgccaacttgaaaagagtttttcagctgatgaatttttcatttgctcactttcaagtaagacaattgtgtacaaaggaatgcttcatgctttccaagttgggcttttttatcctgatttgcaagatgaacatttcaaatctcatattgcgttgacacactcacgcttttctacaaatactttcccatcttgggatcgtgcacagccattccgctttttggcacacaatggtgaaattaatactctccgtggtgctgaaaactggatgcacagtcaccagattgaagtttataacgaagaaaattcggactctgccaagttggaaaactgtctagaatatctttaccgtaatggtcgtgatattccacaaagtcttttaatgatggtacctgaagcttggggtgatgaatcagggctttcagatgatttgaaggcattttatgaatatgcgtcaagtttcgtagctccatgggatggtccagcagcgcttgttttcactgacggtgatatggttggtgcgcgtttggaccgtaatggattgcgtcctagccgttattcattgacaaaagataatttccttatttgctcaagtgaatctggtgttgtcgatcttgaaccaagtcgtgttattgaaaaaggtgtgcttggacctggtaatatgatgttgattgacacgacttcaggaaaattaatgcgcaatgaagaagtgaaagcatactatgctgcacaacatccatacaaagagtgggttgacgaaaacattgctcatcttaacgactttgaggctgctgaattgactcaagaaacaaatgacattgaaacaatgtggaaggcttacggctacaatgaagaagttattcgtacggtcattctaccaatgtctgaaaaaggtgaagaacctattatttcaatgggatttgatagcccactagcagttctctctaataagagccaatcgcttttcactttcttcaagcaacaatttgcgcaggttactaatccgccaattgatgccattcgtgaacaaatcgttgtgtcaactagtgtttacctcggtggtgatggcaatttcaaagctgatggtgctgataactgtgtcaaagtaaaaattgacagcccagttctttcaagtcaagattttgcgaaaattgctaacttgaaagatgaccgttattgtgcaacaactctatctacggtttatgacgtggttgagccgtcacataatcgtttgcaacgtgcgctagaaaatcttttcaaagctgctgaaaaagccgttgataatggtagtaagattattattctttcagaccgtaatgttaaagaaaatcaaacaactatcccaatgttgttagctgtttctggtttaaataactacatggttgtcaaaggaaaagcaagccaattctcaattgttgtcgatacagcggaagctattgaagttcatcattttgcaaccttggttggttatggtgcggctgcggttcacccttatggcgcttatgcgacattgaaagaatatggcaaagacgagcttgcttttgaaaaatatcgtaaagctgctgaaaaaggtattgttaaagttatgagtcgtatggggatttcaacaatccttggttacaaaggggctcaattatttgaagccgttggtttatctgactctgttgttaacaaatactttacaggtacagtaactcgtatcggtggtttgtcacttgaccaaattgaaaaagaataccttcaacgtatggaagatgcttttggtcctcgtcgtggagattatctccaaagtggtggtatttatcaatttaaagcagatggcgagtatcaccttttcaatccacataccatttataatttccaacaagctgttcgtaaaggggactacaaactctttaaagaatacacagctgaattggacaaagaagcattgtcaacgccgacaacacttcgttctatttgggaatttaaatctgaccgtccaaaagttgacctctctgaggtagaaccagcagaaactattgttaaacgtttcaaagttggtgccatgagttttggttcactttctaaagaagcacatgaaacaattgctgaagccatgaactcaatcggagcgaaatcaaactctggtgaaggtggtgaaaattgtaatcgtttcaaagtgcaaccagacggacgtaatttgaactctaaaatcaaacaagttgcttctggacgttttggtgtcaatgcagaatacctcatgtctgctgaagaacttcaaattaaattagcacaaggtgcgaaacctggtgaaggtggtcaattgcctggtcaaaaagtcttcccttgggttgcagaaattcgtggtgcaacgcctggtgtacgcttgatttcaccaccacctcaccatgacatctactcaattgaagatttggcgcaattgatttatgaccttaaagccattaatccttatgctaaaatcaatgttaaattggtttcaagtactggtgttggtacaatcgctacgggttgtgtaaaagctggtgctgataaggttgttatttctggttacgacggtggtacaggagcttctccacgtaactctgtccgtgatgctgggcttccatgggaaatgggcttggctgaagcacaccaaacattgtcacttaaccgtctccgtcaacgtatgactcttgaaactgatggtaaattaatgactggtcgcgatgttgccattgccactcttcttggagcggaagaatattcatttgcaagtctagcattgatttctattggctgtgtgatgatgcgtgtttgctcattgaatacttgtcctgttggtgtagcaactcaaaatccagaacttcgtaaacattttgcaggtaaacctgaacatgtgattaacatgatgatgtttatggcagaagaattgcgtgaatatatggctgagcttggtttccgttctgttgacgaaatggttggtcattcagaaatcttgaaagcgaaattcattccaaaaggtaaagcaaaatcgcttgatttttcacgtatgcttggtacagcttatccaattgaccgcaagacagaagatccatttgctgaagcacgtcaatggaaagaattagacggatttgccaaagctgctgttgataatggcgcaagcgtgacggttaaagaatcaattaacaatgttcaacgtgcagtcggtgctcgaatggcaggctggatggctgaacgttatggaaatgataccgttgaaccaggtttgattaaatatgaatatactggtattgctggtcaatcatttgcaagctttatcacacaaggtatggaattaacgctagttggtgaagcaaatgactacattgccaaatcaatgtcaggtggacgtttgattgttaagccgccgcatgatgctgcttatgatgttgaaaattcaccaatcgttggtaacgttgctctctttggtgcggttaagggtgaagcttatttcgctggtcgcgcaggtgaacgtttctgtgttcgtaattctggtgctaaagttgttgttgaaggtgtcggagcacacggttgtgaatatatgacaggcggtgttgctgttatccttggaacaacaggacgtaacttcgctgctggtatgagtggtggtgttgcctatgtttatgatgtggacggtgattttgccgaaaaagttaaccaagaaatggttgacccttacaaagtcggtgaaactcgtggggatgatgtcttggttgatatgattcaaaaacactatgaatacacaggtagcgctaaagcaaaacgcttgcttgacaactgggcacaagaagttgataaattcattaaagtttatccaactgaattccatgaaattaacaatattgaatacgcacttgctaatactggcttagaaggtgatgaacttgaattgcgtaccttcgaaattgccacaggtggtgcagaaactgctgctaagaaagaagaacttctcgcacaagtaacaggaggtaagtaaaatggctaatccatttggatttttgaaatatgaacgtaaagataatccgtttcgtcctgttgctgaacgcatcttggactttgaggaattacaagttccattgtcagaagaggatcgtcaaaaacaagctgcacgttgtatggcttgtgggattcctttctgtcattctggacaattctacggtggtggacgtgcggtttcaggttgtccaaatgacaacttgattcctgaatggaatgatttgctttataaaggcgattacaaacgtgcttttgagcgtctttcacgtacaaatcctttcccagaaatgactggacgtgtttgtccagcgccgtgtgaaaaaggttgtacagaaggtctcaatggctctggtgtcactatccatgataatgaacgctttatcatcgatacagcctttgaaaatggttgggtagaggagtcaggtcgtccagcctaccgtacaggatttaaagttgctgttattggttctggacctgcagggctttcaactgcttggcgccttaataaactaggtcatacagtaactgtttatgaacgtagtgaccgctttggtggactattgatgtacggtattccaaatatgaaattggataaggaaattgttcaacgtcgtattgatttgatggaaaaacttggtatcaattttgttgccaatacggaagtgggacgtgatgtaacagcggatgaattgttgaaacaatatgaccgtgttgttcttgcaactggtgcaagtgttccgcgtgatttggatgtcccaggtcgtcatctatctggtgtgcgttttgcggttgatttcttaactgaaacgactaaaaatgtccttgcttctgataataaaaaacttggtccaacgcttgaaggcaaacatgttcttgtcattggtggcggtgatacaggtaatgactgtatcggtacggctgttcgtttgggtgcggcaagtgttaaacaacttgaaatcactccagaaccgccagaaaaacgcttaccaacaaatccatggccacagtatccaatgattaaacgcgtcggttatgggcaagaggaagccaatttcgtacaagatacagaattgacaacttatgccacatcaacaactgaatttatcggtgctgaccgtggtcaagtcattgctgctaagactatcaaagttggtcctggtttcaaaccaattgaaggaactgaagaaatcatcaaagcagaccttgttttactagcaatgggattcacaggtgctgaaaaatcattatttgaacaatttggagttcaaagtgtctatgatgactattcaacaaataatgaccgtgtctttgttgctggtgatgcacgtcgtggtccaagtcttgtgatttggggaatccgcgaaggacgcaaagctgcagaaaaaatcgaccaaggtcttcgtatcatggttgcacaataaaactaagaaagctcgcttttatggcgagttttttgcttggattcaagatagtctttaggtttatggacaatggcgtctttatggtcatattttagatgtggtaaattgaaatataacgcttacatgattttatacaatttgtaacaattccttgatatactaatggtaatcaaaaattgggagacggatgtttatgaatcgaaaaacacaattagctttagcaacagcaacagtttcaggagctctgctattttcacaagtaaatgcagatgctgacacttatacactacaaagtggagattctttttatagtgtatcgcaattgtacggtatggatgtttatgatttggctgctttgaatggcatgtcaatttatgatacgattgtccctggtcagacacttcaagtaccagaccaagtttcggtggaaacaacgtcaactgaagaagtagcaacagagactagcacaaatagtgataatacctatccagttggtcaatgcacatggggagttaaagagttagcgacatgggcaagtaactggtggggaaatgctggtgattgggctgctaatgctgccttgcaaggatatactgtaggaacacaagcagaggttggagcgattatttgttggactgaccctgacagttacggacacgtagcatatgtaacagctgttagtgccagcggtgaaattcaagtgctcgaatcaaactacggtgataaacaatggattgataattaccgtggctggtttgacccaacaaatagccaaacagcaggcacagttagttacatttatccaacgacttattgatatcaatttaaaacatagaaaaagcagtttgaaaaatcaagctgctttatttttgtggataagttgtggaaaaagggaaaatgtgactttattcatgaacttaaaaattcaaaagcaaatcggtaacttcaaagagatttgattttttagctagtcttagttttcagctgctgacctaaactgatttgttcccgatttctgcgttttgtcatttatcatttcgtaaacaaagaaactgagcacttttgtctcagcttcgttaattctatttttcatctggtgtgagaatcattgggataatgattggttcacgttctgttttttcgtacaagaatggacgaagtgcgttaacgatagcaccgttaacagattgaatacttgcatccttgtttttcaaggcaatgcgaatcgcgttgaaaagaacacgttgactttcacggataaggtcgcctgattcgcgcatgtagataaatccacggctgagaatgtcaggacctgctaaaatcatttgtgtgtcaaaatcgacagttgcgacagcaagaacgacaccgtcttctgataaatcgtgacggtcgcgcagtacggcagcaccaatatctccaataccattaccatcaacataaatgtcttgagcattgaagtgtccagcacggcgagctgaattagctgtaagagctaggacatcaccgttttccatgataaagatattatcttttggcacacctgtgtccattgctaaaccagcatgaatcttcagcatacggtattcaccatgaactggcatgaagtattttggtttcatcaagcggagcatgagtttttgctcttgttgaccaccgtgaccagatgtgtggatattattgactttaccgtggataacttcgacaccagcttcttggatagtgttgataagtttattaacacttgttgtgttaccaggaattgggctagatgagaaaataacggtgtcgccaggttgtagtgtgacttggcggtgtgtaccattggcaatacgtgctagcgcagccattgattctccttgactacctgtacacatgattaagatttcactagcgtgatagtctttgagttcacttggttcgataaatgttccttttggaactttgatataaccaagttcgataccgttgacaatggctttttccatagaacgtccgaaaacaacgattttacgtcctgttttaacggcagcttcggcagcttgttggagacggaagatatttgaagcaaatgacgcgaaaataatacgtccatgaatgccttcaataatcttcatgatagattgtccaacgactttttctgaatttgtaaaggttggaatttcagcgttggttgagtctgataataaacagagaacgccatcttcaccaagggcagccatgcggtggatatctgctggctcaccaactggtgtccagtcaaatttgaagtcccctgtgcagacaattttaccttgtggtgtgtggataacgattccaagaggttctggaattgagtgggttgtgcggaagaaagtaacgctaaggtttttaaatgttaattctgtgttagcattaatttcatagagtttagcatcacggagaagtccgtgttcttccaattttcctttgataagtgcaagagctaatggtccagcgtagattgggatattagcttgttttaagagaaatgggattccaccaatgtggtcctcatgaccgtgggtaataacgagccctttgatacggtcaatattttcaacgatataagaataatctggaatgacataatcaattccgagaaggtcatcttcagggaatttgataccagcatcaacgatgataatttcatctttgtactcaataccgtaagtattttttccgatttctccaagaccaccaattgcgtaaaccccaacttcttcgggttttaaattgatttgtgacatgttataactccgttaatttaaagacacctgtttctttttcgtaagctaggtgtttatctgatagaagttcaataaattcaacgttgtaaggtgttttttcttcaacgagtttgcgtgttttgatgcgtccttcgagttcagttgtggcatcaatgtctaagtagagcactttagtttgctcacggcgtgggttacgttcttttgtttcttggtaaaaaactttataaatcatagttttcctttctttatacctgtggctaatcaaactacaaaaaacctgccaaatagctttacatctacttgacaaacatctatgaaatttttacgagtaattgatttaaccttgattcgttgcaattattaaaattatatcataaaataagaggtagaatcaagtgagggaatttaaatgatgaaagttttagcctttgatacttcaagtaaggctttgtctgttgccattttagatggcaagaatttgttagctgatgtaacggtcaatattaaaaaaaatcacagtataacattaatgcctgcgattgattttttgatgacgtctgtggatttgcaaccaagtgatttagatagaattgttgtagcgcaaggtccagggtcttatactggtttgcgcgtggcggttgcgacagctaaaacgttggcatatacgttaaatattgagttagtaggggtgtcaagtctgtatgcacttgctgcggcagctgattttgatggcttggttgttcctatcatggatgcccgtcgtaataatgtttatgctggtttttataaaaatggtcagtctgttaaagcagaccaacacatgagttttacagctgttttagaagccgttaaggctgaagctaaggttatgtttgttggtgaagtggataatttccgcaaccagattgaagaagctctaccacaagctgttattttacctgttttgccatcagcttatgctattggaaaatatggtcaaagtcttgaaccagctgatgttgacagttttgtaccaaattatctcaaacgtgtggaagcagaggaaaactggcttaaaacgcataaagaagattcaactgcagattatgtcaaacgtatctaacatgaaagatttatcagaaaaagtgactgctgtttatgctatcttgtctgatgtctatgaagtgtcaccatggacaaaaaagcaaattttagcagatatgcagcaggatagtgtggattatttttttgtggaaaaagacaaggaaatggttggttttcttgcaattcagcaacttgttggcgaattagaaatcacaaatattgcggttaagaaagcttatcaaggttgtggtttaggtagtcagttattgaccaatttagaccagattgactttccaattttcttggaagtgagagcatcaaatacttctgcgcaagctttgtaccaaaaatttggatttaaggtgattggtgagcgtaagcgatattaccataatccaattgaggatgcgattatcatgaagcgtgaaggtaatgagaggtaaaaaagataaatgaaagatagatatattttagctgtggagagctcttgtgatgaaacaagtgttgccgttttaaaaaatgaaagcgagattttgagcaatattattgctagtcaaattgaaagtcacaagcgttttggtggcgtggtgccagaggttgctagtcgtcaccatgtcgaagtgattacaacgtgtttcaaagatgctttggatgcggcaggaattgaagcgagtgaccttgatgcggttgctgtaacttacggtcctggcttggttggagcgattttagtggggatggctgctgctaaagcttttgcttgggcgaaccatttgccattgattcctgttaatcatatgtctgggcacttgatggcagctcgtcaagtcaaagaattagcttatccattaatggcattattggtttctggtggacacacagaattggtttatgtgtctgaacctggcgattataaaattgtcggtgagacgcgtgatgacgctgttggtgaagcatatgacaaggttggtcgtgtcatggggttgacttatcctgctggacgtgaaattgaccaattggcacatcaaggaaaggatatttatgattttccgcgtgccatgattaaagaagataaccttgaattttcattttcaggtttgaaatcagcttttattaatttacaccataatgctgcgcaaaaaggtgaaacactctcaaaagaagatttatcagcatcatttcaagctgccgttttggatgttttgatggcgaaaacaaaaaaagctttggaaaaatatcctgtcaaaacactcgttgtagctggtggtgtggctgctaatcaaggcttgcgtgaacgtttggcagatgaaattacagaagcagaagttgttattccgccattacgtctttgtggcgataatgctggcatgatttcgctagcagcagcgattgaatacgataaagggcactttgctgacttagacttaaacgctaaaccaagtttagcttttgatagtttggattaggggattattttcctgtaaactaatgtctaaatagaaggtaaaaaggaatgaaaacggctttattttgattgatattcaaaacggctttttatctgaaacgtttgggaaacgttatgacccttacgctgagaaaagaatttcagaaatagtaaactattttagacaaaataaacaacctgttaaccacgttgtaatatactgactgtgagataatggttgactttgagccgaaaggtgatgagccagtatttgaaaagcaagttaatagtgcttttataggaacatctttagaagcatacttaacagaaaaagaaattcataattggttatagttggttttactttgtcacattgtgtttcaacaatgactcgcatggcaggaaatttggaatttgacgttatttgatggttggatactacagtaaccttttcattccctaatttatctggtgaattattggaaccagagaagttgcatcacttcaaggtgaatttgtctttatcatggcagtagatgattacattaatcgagtaatcaatgtttagtctttttttggtataataatttctgattggaataaaagtccctagaatttctagggacttttatttgttatgccagaataacggttgtctctttttcaataattgaacgtttggcttcgtcagcatctgaatctgtaattagagcggtaatatctgaccagtcacaaattttatagagactttttctttcaaatttactagaatcagctaaaatgaaagctttatcggcttgttttattatttcttggtcaatagacacatctgaagaagatgggcttgaaggaccatcaatatttgaaaaaccatctgaaccaaggaaacagatatcaacgaagacttgtttgatttgtgaaatggtccatcctccgaagactgatgagcttttaggacgaaattctccaccaaaaaagaatagctgattatctgaattaaccaaagcatttgtaacaggtaaagaatctgtaaaaattttatagccagatttttgagctaataaataagctaattcaacagttgtactacctgtaccaatgataattgaagcattgtctggaatgagttcaagagctttttgggcgattctttttttatcagaagtattttctttttcacgtgtgttgtaagataattcgatagcattttgttttaaaatagccccaccatggctttttataagcagtccctttttttccagataggataaatctttgcgaattgtttcatagctaacttcaaattgttcagataatttgctgacatagacagttccattattttttaattcatcaagaatgagttgacgtcttttttctaataacatagtttaacctcgcttgtttctaaagataattatatagtaaaaccaataaaaaacaagtattttactttaaaagccaacaaaaaataataaaaaccaataaaaaactattgacaccaactaaaaccaatgctaaaatacagatataaaaaagaaagcgattacgaggaggtaacaaatgaaaacaaaaatcgcaattgcctgtgatgatttgggatttgaaacaaaagaagctctcaaaaactatcttatcgaagaaaaaaatgctgagatagtttatgatcctgtaaaaatcccagaagatggtgtcaatacttttgcagttctggcggatgaaatggctgaggttattcaacgtgacaaatgtcgattaggaatttacatctgcggtactggaattggttttacttgtcaaatcaataaacattggggaattagagcgacagctgtaacgaatccttactcagcaaagcgtgcaagacttagtaataatacacaggttattggtcttggttgccgtgtcaatggtcttgaatatcttaaacagattgtagatgcttggtatgatgaaccatttgattttagtacagctcgtgaaaattcaaagaaaaatttattggaagcagaagctgatgataatcgtttattgaaaaagcctgattatgtcgcgtggaacatgggctttagacctgaatagtaaaggaggaggctagttataagctggctagtagaaaaatggaagttattacaaattttattaatgatttaggaaattttatttttattccactaattttcttgattttcatgctgattttacgtcgaccgctttccgaagcaattcaatcagcaatgaaggttgggattggttttattgctttatctcttgtcattaatttcatgttagataaaatggagccagccattactggactagcagaaaagacaggatcttctttaagtgctattgatgttggtggtgctgcgactgcggttatgggatttggttcaaatatgggagcaattattattccactatgtgttggtattaatattcttcttcttgttttgaaattaactgactgtgttaatgttgatgtttttaatcttcatcaaaatgcatcaatgggagcaattgtggctgtttattctggtaatttcctttatggagttttaacagcaggacttttccatgtctgggcacttattgcagctgatttaggtgcaaaacgtaataatgaattttttgggttaccaaaaggagtttccatttcacaccctgttgctaatacttatcttttatttgcttacccgtttaactggatttatgatcatattcctggtttgcgtcattggaatgttaccgcagagtctatccaaaaacgttttggagtcttgggtgatccaacagttgtaggttttattcttggtgtgcttttaggattatttggttatgattggagtaacccttatacaacaattatctcaagtttacagcttggtatgtatttggcagctgttatgcttcttcttcctaagatgacttcaatcatgatggaaggacttgttccgctttcaaatgctgcgcgtaagaaattggttaaaaaattcccagaccgagaaattacagttggtatggatacggcacttattgttggtaatccatcagttatcgctccagccttacttcttattcctgtaatggtgattctagcagtcattttacctgggaataaagtcatgccgttaggtgatttatcacagtttgtcttcttcattgcgtgtatggttcctgtttttaatggaaatattattcgtacttggttgacttcagtgattctatttggtggtggtctctatattgcatcatggatgacaccagcaactaacgaggtcttccaaaaatttggtgcaggtgctaaagaaggtgttatgtattcttctttaaacccatccgctaatccttttacaggtctctttgcggcagtatcacatattggattaattggttatattttagttggagcaattcttgttgcagtaggctatctacttaagaaaaaagaacatgctcaaatcgaaaatgcttaataaatagaaatagaggtaattattatggctaaaaaaattcttgtcgtttgtggaaatggtattgcttcatcatcaattatggtgtcagttttacaagatttcttaaaagatgaaaaaattgctgatgttcaagttgataaagcttctctcatggattgttcaactgaaaagttcaatagctatgatttagttgtttcatctacaaaacttgaaaatgaaggtttaacagttccagttatagttggagcaggtttacttactggtattggtgaggatgaaatctttgatgctgttaaaggtgaaatgattaaataggagtttattatggtttatgttgtagtgaatgatgcagatgaaactgtaaacgattatcaatcggcaattcgttttgcgggagaagcacttcttgaagtaaataatattaaaagtgactatattcaagcgtgtattgaccgtgaggttgattttcccacaggtttatcgttggcaagtggacaaggcgtagcaatgccacacggtaattctgattttgtgactgaagatagcgtaagtgttgtacgtttatcaaaaccagttgcttttggattaatggaagataagaatcaaaaggttgacgttacattagtttttaatctagctttgtcatcaggaaaacagcatattgcagttttacgtaaagtgattgctctttttcaagatgacgtgtttattaagaaatgccaaaaaaatagtgttgaagaagtagctagtgacattaaagcaaaactagattcttaaaagttgaggtagacaaaatggaagaatctcaaattattctatctgatattgaaaaagcggtaaatcagattgacgatgagaaattggatgatttggcgaataaaattgtaaattcacatcatatttttttagcaggtatgggaaggtcaggtttgatgattcgtgcatttgctaatcggttaatgcatttaggattatcagtaagcgttgttggagacattaattccccccacacacagccaaatgatttagtgattattggctctggttctggagaaacagatagtttagtttcattgataaaaaaagctaacacgttatcgttagattcagctcttattacaacaaatttatcatctacaattgggagattatcaaatttagttttggtgattcctgctcaaaataaagctagtgagcaagttggaaaacaacctatgggttcagtatttgaacaatctagtctggttttatatgatattcttattttaaaattaatgaagattttaaatgaatctaatgaaagcatggtaaaacgtcatgcaaatttagaataataatctccgttctaaatcccaaaatacccttgcaagctatgcaagggtgttttataatggtaactaatatttaattgtccaaatggtagagaacttagatgttttctgattgatgttactatatttagggagtttgtatgcaggaaaaagggtttaaagcggggcttcaagatgcgcttccaacggctttgggttatatttcgattggattagcttttggaattgtggcgtctgcttcaggattatcagctttagaagttggcttgatgagtcttttggtctatggtggttcagctcaatttgccatgtgtgccatgttgcttgctcatgctgatttggcttcagtaacgttgaccgtttttttagttaatttgcgtaatatgttgatgagtttgcatgcaacaactatttttaccaaaacaagcttcctcaataacattgggatagctagcctaattacagatgaaagttatggtgttttgttgggagaaaatgttcacaataaatcaattgcagctagctggatgcatggtaataatctactgagttatgcagcatgggttttatccacaattgtagggacactcctaggaggtattatccccaatccagaaagttttgggcttgattttgctctgattggtatgtttattggtttacttgtctttcaatttgatgcgatgttgagtgaaggcattaaaaaactattgcttgtactagcagctgtggctattagttttttagtctgtgctgtttttctatcaagtgccttagcggttttagtgtcaacgttaattggttgtagtgtgggggtaatgttggatgagcgttagtagttatgttttggtagccattcttttaggatttgttgtgtcgtgggttccgcgagttgccccttttatcttggtaaaatataaaggcttgcccgaaattgtcattcgttttttgaaatatttgcccgtttccattttatttgctttgacgttttcaagcctttttgacgttgaaattgggcatttgccacaagtaaaggacttggaagttctagccagtcttcccactttttatgtcgccttaaaatctaaaaatttattatatgccgtcattacaggaattgttagcatggcgattttacggttaatattttaattttgccattaattgtttgagttgagcaatttcttctgtggataagtttgataaaagaaaatcagattgcttttgttcatattcgtgaagctgtggataaatgtccatggctttttctgttggataaacacgtttgattttctggttaacagcatctttctttaattcaaaatagccgagcgtagctaatttttttatcgttctaaaggcagttgtacggtcaatttggacattgtctgccaactcgcccaaaaacattccgggtttttcacagacacgaataatatagatgaatagattgttatttagtccaagttctttaaaatgattattagagtcaatttgaatggtgcgcgtgacagcaccaatagtacgaataatatcaaacataatagtttctccttgctaaaaattttaacaaaaaaatattgcatttacaataaaaagtgatataataatctcaatattattgtaaatgcaatcaaaagaggtgctaatatgttacattttgaaaatgattataataaaggaattcatccacagctactccaagcgcttgtggatagtaatcaagaaagtcttgctggttatggcatggatagctattgtgcacaggctgcagaaaagataaaagaagcttgccattgccctgaagctgaaatcttctttttatcaggtggcacacagactaatcaagtggttatcgatagcttgttaacctcttacgaaggtgttatcgctgctgaaacggggcatgttagcactcatgaagctggtgctattgaatttacaggacacaaggtactaacacttccttctcaccaaggaaaaattcaggcggctgagcttgctacttatgtggataacttttatcatgatggcaaccatgaccatatggtttttccagggatggtttacatttctcacccaactgaatatggcacgctctacaccaaggaagaattgaccaccatttcagatgtttgtcgtcaatatcaattgccactatttattgatggcgcacgtttaggatatggtttggcagctaaggagacagaggtcgatttgccaactattgctgcattgtcagacgtcttttatattggtggtaccaaaatgggagcctttattggtgaagccgtcgtgtttacaaaacaaaatacaccaaaacattttgtgacaacagtcaagcagcatggagcacttttggcaaaaggttggctgattggtgtgcaatttgaccgtttctttacggataatctttattttgaaattggtgagcacgctattaaaatggcagagcagttaaaagacattttacgtgaaaaaggctatcgtttctatctggaatcaccaacaaatcaacaatttatcattattgaaaatgctaaattagccactttaggtgaagtccttgcttatagcttctgggaaaaatatgacgatactcatacggttattcgtttggcaacaagctggtcaacaacgcaagaagatattgataaattacgagaggttttatagaggtaaggtatgcagatatctatttttgaaccaaagtttaatcaggcggtgatagacttgatactaactatccagcaagaagaattttcgcttcctatttccttaacggaacaacctgatttattggacattgaaaattcttatcaaaaacaaggtggtcaattctgggtagctatcaatgagaggaaagaagtgctagggtgtattggcttagtggctcttgaacaagacaatgttgctttaaagaaaatgtttgtaagtaaaaattacagaaaagcaggtttaggaaaagaattattgaaggcttttgtagcttattgccaaaaagagcagaagaaggctatttttcttggaacaacaacagattttgaggctgctcagcacttttaccgaaaatttggttttcaagcaattgaatcatcaaatttacctactgattttccacgtttagctgtggataatcgtttctatacttatattattaactaaaaaagctggggacatcccagctttttgtgtgataaaaacttttgtctttctatttttttaaggattaccagctggcttttttgacgccaggaagttgtcctttgtgagcaaggtcacggaagttgattcggctaacgccgaatttacgcatgtatgcgtgtgggcgtccgtcaatgcgatcacgatttttcaagcgatttggatttgagtcgcgtggcaatttacgaagtgcttcgtaatcgccttttgccttcaattcacgacgtaagtcggcatattgctcaatgagttttagttgtcggttgtatctagcaatttttgattttttagccataatgtctccttttgcttaactggttaacgatatttattataacacctttgaggaaataatcaagagaaaaacttaactagttaaatatttttaaaaaaagaaacccacaaaaggatttctcaacaattgttagtaatgtaaacttccagcgacccagcctgtgcataacgccacagtgatgttaaaaccacctgtgtgggcattaatatcaagcacttcaccagcaaagtaaagtcctgggacttgcttactttcaagggttttgggattaatttctttcaaattaacgccacctttagtcacaaaagattttgccagtgacatttttccagttactttaatcggcagctctttgatgttatccacaagttctttttcttgttgtggcgttagttgtttgactttttcgggaaatggctgtgctaaaaagcttgctaatcgttctggaagaatcactttaagagcatttttgagggatttctcacgctgctccgctaaaaatgtgtgtagctcttctgtggatagtttggggataaggtcaagtgtaatgatttcgccacccttgataaaacttgataggcgtagtgcggcaggtccagacaaaccaaaatgcgtaaagagcaaatcatgtgtaatatggtgtttttgatagctcaaacaaacatcatcaagagagattccttgaagttccttatgtggaaaatctgttaataatggactttcagccgcttcaagttctgtaagattgagtttaaaatgcctagcaatctcataaccaaaacctgttgaccctgtggaaggataggctttaccacctgttgtgacaatgagttttccacagatgaactcatctgtcgcagatttgacgtggaaaaggttgtcgattttcttgacagaaacaacttcagtattggttaaaacggtgccaccgagttcattgatcttatgggcaagagcatcaataatcgtttttgatttatcagtttttgggaacacacgcccatggtcctcaacttttaaagcaacgccattttcttcaaaaaatcggataatgtcgtggttgtcaaattgtgaaaagacactgtaaagaaagcgtccatttccaggaatgccttccatgaggtcatcaatggtaccattattagtgacgttacaacgtccaccacccgttccagctagttttttgccgagtcgtttatttttttcgataagtaatgtttggttgccataataactgcttgaaatggcagccatcataccagcgggaccgccgccaatgataattgtatcgtatgtattcatatagctattgtagcataaaatattgctatcttgataagcaagtaatgggatttgtgaaaagaaagtcaggacgtttacagaaaatgacaaaaacttgacagtagttctaaaaaacaagttaatatcaagtaaaaagcgcaccagaaacttggtaaaaattgacaattatagactgttatgttatccttttcataagaaatttcaacgtaaaagaggatattatggcaattgagaaaacagttagcgagctggctgagattctaggagttagccgccaagcggttaacaatcgtgtcaagagtctgccagaagaagatgtcgataaaaatgaaaagggagttaccgttgtcaaccgaagtggcttgattaaattggaagaaatctacaaaaaaaccatttttgaagatgagccaattgatgaagaaacaaaacaacgcgaacttttagaaattttagtggacgagaaaaacactgaaattacacgtttgtatgagcagctcaaagctaaggataaacagcttgcttcaaaagatgaacagcttcgtgttaaagatgtgcaaattagcgaaaaagacaagcagcttgatcagcaacaacaattgacgcttgctgccatggaagacacaaagcgccttcagcttgaacttaatgaagctaaggctgaagtcgaagaaattcaaacgaagtcagaagaaaaaattcaagaagaagcagctccgaagggattcctagcgcgtctttttggtggaaaataagaactcgaaatttatcggaagctgggacaaaagttccagctttattttataaactcatttttaggaggtatcatggaaaaattagcagagtacattgcatttgatttggaatttaatacggttgctgagaaaagtcatattattcaggtttcagcagtaaaattcaaagaaggtcacgaagttgacagctttgacacttatgtttacacagatgtgccattgcagtcatttattaatggattgacgggtattacatcagaaaaaattgctaacgctccaaagcttgatgaagtgcttgctgactttaaaacattcgttggagagactgctttggttggttataatgcgctaaaatcagacctgcctttgcttgctgaaaatgaattagacttgacagagctttacaaggttgatttgtatgacgaagcttttgaacgtcgtagcacagacttgaatggaattgccaatctcaagttgacaagtgttgctgaatttttaggtatttcaggacatggtcataattcacttgaagatgctcgcatgactgcgcttgtttatgaaaagttcatggaatttgatgagaataaatcttatttgaatcagcaagaagaagagcatggtgacaatccttttgcagctttaggtggcttttttagctaaaagctctgctatttttcaaaaaataaaaaatcatctagggtaaccccttgcttgtgacgttggggtatgtcctataataagggcagaaaggaggtgaaaggaatgtctcgctcttatacaactggcgatttggcgaagttggcaggtgtttcagttcgcacggtccaatattatgataaacgtggtattttgtcgccatctgatttgacagaaggtggacggcgaatctatgtggatagtgatttggaacagttgcgcatgatttgttttttacgggaacttgatttttcaattgaacagataaaacggctgtttgccgaggaaaatgcaaggcaagttttagagttattgcttgttgagcatatcaaggaaacaaagcgtgagcttgctgagaagaaaaccaaacttgacactactgtcaacttgcttgacagggtaaaaaatcaaacaggtcagtcgctagaatttttatcagacatttctcttaccatgaaaaatcaattagcttggcgtcgtttgcaaaaacggatgtggattagtaatctagcaacgattcttatttttgttctttgtgttgcttggcttgcaagtcgtccacaatctgttgtttggcaaggtgttggtatcggtattgttttggtatatgttggcacattattaacattgtcttatcatttttcacgtaaaatagcttatatctgtcccaattgccaccaacttttccaaccaacgtatagggaattcgtatttgctcgtcatactcctaaaacgcgaaaattaacttgcccacattgtcatgaaaaatcttattgtttagaaacagcaaaagaagcttaaaaagctcgaaccttaaaaggttcgagcttttttgattatgtcattaaaatggtaattttcctgcaaatgcgcctagtgttttttgtgtggcatcatcaatttgagaaagtgcatcgttgatagcttgtgttgtcatgtcttgaagtgtttcaacatcatctgggtcaacaatggcatctttaaaagtgatgttcactaattttttatcacctgtaaactcaacaacaactaaatcttgagctgattttccagtgaaagttgtactagcaagttcagattgttttttctccatttgtttttggagtttttgagcttgacgcatcatattttgcatattcatcataatatttttgtgattcctttcgtagcaaggggttagaccttgtttatttggagatatatcttgaaaaaagatattaacattatagcatctttcggatagaacttaaagtttggaaaaagcttggcgtgaaattcttagcaagttttggaatgattttacaaaaattttacaaaaacttggtaatagatttgatacttgctcattataataagcagcataaagatgttaaaggagaatatcatgaaaaaatggaaaatgctaatgttacttgcatttgttggagtgggagttgttttgacagcttgtagtaagtcaaattcatcagaatccaaacaaatcagtgttgtttctcgtgaggaaggttcaggaacacgcggtgcttttatagatttatttgggttagaggaaaagaatagtagtggtgatactgttgatttaacaactgcgaatgccatcgtgactaactcaacatcagtaactctaacaactgttgcaggagacgatttagcaatcggttatgcctctttaggttctttaaatgatagtgttaaagttttaaaaattgatggcacaaaagctagtgtagaaaccataaaggatggttcttataaaatctcacgtccgtttaatattgtgaccaaagaagatattagtaaggctgcgaaagattttatcaatttcattttaagtagtgatgggcaagccattgttgaagaaaatggttacattcccttagacaatgtggatatgtatcaagcgagtgttacttctggaaaagttgttatttcgggttcaagttcggtgacacctgttatggaaaaattaaaagaagcctatacgaaagtgaactctggtgttactattgaaattcaacaaagcgattcttcaacgggaattacggacacgattgatggaacatcagatatcggaatggcttcacgagaactagaagatagcgagatagcacaaggtgttaactcaacggttattgctatggatggtattgcagttattgtcaataaaaataatacgatagataatcttacgagtgaacaagtcaagagtattttctctggtgagatcacaacttggaaagaactatctgattaagaggatttcatgaatcataaaagcgaaaaagtaatgcaagcggtatttttccttaccgcctgtatttccattgtttcagttttacttatttgtatttttctattttcaaatggactgcctgcgattaaggaaataggtattataaagtttctatttggggaggtttggcgtccatctagtaatgagtttggaatattgccaatgatagtaggctcactttatgtgacgttgggcgctctagtcattggtgttccaattggaattttgactgcggtgtttatggcatatttttgtcccaataagctatataagccattgaaggcaggtattaatttaatggcaggtattccttcagttgtgtatggcttctttggtctagtagttttggttccctttgttcgtgattatatcggtggttatggtatgggagttctaacagcagccattcttctaggaattatgattttaccgacaatcgttagtgtttctgagacggctattcgtgctgtccctcatcactactatgagggaggtttggctttaggggcttcacatgagagaagtatcttttttgttgttttacctgctgctaagagaggccttctagcagcaataattcttggacttgggcgtgctgttggagaaaccatggcagttattatggtagcaggtaatcaagctatattgccgaaggcattaacatcaggggtgagaactttaacgactaatattgttatggaaatgggttattcaacggggcttcatagagaggcacttattggtacagctgttgttctatttatttttgtactcattatcaatatctgtttctccctattgcataaagaggaataaggtgtatggaaaatattaatcaaagaacgttaaagcagagagcagcatctcgtagacaagattttgtgtcattcatcctttttggtttggtctatttcgcggctttcttaagttttttagtgattatttttattgttggttatattttagtcaaaggtgttccacatcttaataaagctttattttcttttacttatacaacggaaaatgtttcgttactgccagctcttatcaatactttatttatcacagggttgacgttacttattgcaattccaataggtataggtggttccatttatttaacggaatatgctaagaaaggtaatccgatagtaaatatcattagaattgctacagaaacattatcaggtattccatcaattatttatggattatttggagcacttttctttgtaaaatatgtacattttggactttctttgttatcgggttcgatgacgttgagtattatgattcttcctttagttatgagaacgaccgaggaggccttactttcggttccaactagttaccgtgaaggagcatttgcgcttggcgctggaaaattaagaactatttttaaaattgtcctgccgagtgctataccaggaattttttcgggaattattttggcaattggtcgtatcattggagagtcggctgctcttatttttacagcaggtacagtagctgaggttgcaaagaatgtatttagttcgtctcgaacgttagcggttcatatgtacgctatttcgggtgaaggtctttatatcaatcaaacttacgcgacagcggttgttttattgcttttggtcattggcattaattttttatctggtttggtagcaaaacgtttaggaagcgagatggatgatgagtaaactaattattgataacttggatttatattatggagaatttcatgctttgaaatcgattcatttagaaattccagcaaatgagattacagcttttataggtccttcgggatgcggtaaatccacacttttaaagagccttaatcgaatgaatgacttggtcaaagattgtcgtattacaggaaaagtgcttttggatggtgaagatatttactgtgatttagatattaataagcttcgtaaaaaagttggaatggtcttccaaaaaccgaatccgtttccgatgagcatttatgataatattgcctttggaccaagaacgcatggaatccatgctaaaacggagttagatgagattgttgaacgttctctgaaacaagcggctatttgggatgaggtgaaggataggttaagcaaatctgcaatgggcttatcggggggacaacagcagcgactttgtattgcgcgtgcactggctattgagccagatgttcttctaatggatgaaccaacaagtgccttagaccctatatcaacgtcaaaaattgaagatttggttattgagttgaaaaagaaatatagcattgttatggttactcacaatatgcaacaagctgttagaatttctgataaaacagcattctttttaatgggggaagttgttgagtttaataaaactagtcagttattttcacttcctcaggatgagagaacagaaaattatattacagggagatttggatgattcgttcaaaatttgaaaatcaattgcaagagttgactaaaaatgttatcttcatgggggctttgtgtgaggatgttatttctaaatctgtccagtttttaaaaactgacgattcttacttggttaataatgttattaaaacatatcagaaaattgagcaattagaacgtgatattgaagagcaatgtttgaaattacttttacggcagcaacctgtcgctaaagatttgagacgtatttcggcagttttgaaaatggtatatgatatgaagcgcattggcgcacaggcggctgagattggtgaaattattaatcaaggacatattcagcctggtcgtgaattagatcatttgcaaagtatggttagtcatgtggttgaaatggttacgatcagcatagatgcttttgttcatgatgatgaatccttagctaaccaagttatccaaaatgacaatacagttgaccaagaatttgatacaataaagatggatttgatgacttacttttcaggcagtgatgtagatggtgagcatgctattgatgttctgatggttgctaaatacatcgaacgcattggagaccacacagttaatattgctaagtggataattttttcgattacagggcaattagagggagacgactgatgatttattgtgttgaagatgatgatgatatccgtgaattaatgctgtacacgttaaagacgactggttttgttgcgcaaggatttccaaatgctgagctattttggcaagctatagaaagtcagaaacctgacttaattttattggatattatgttgcctggaagtgatggcttaagcattttagaagaattaaaaggaaaaatgtctactgcggacattccagtgattatggcgactgctaaggggacagaatttgataaagttaaaggattggatatgggatccgatgattatttggttaaaccttttggcatgatggaaatgatttcgcgtattaaagctgttttacgtagaagccaaaaatcgcaaagaaaacagatattacaggttggaaacctttctttagatattcaaaattatacagtaaaaaaagatggaaaagacattagcttaacgcttaaagagtttgaactacttggacttcttatgaaatatccaaaccgcgtctttacacgtcaagaattattaaatcaagtctggggagaatatttcgttggtgagactagaactgtagatgttcatattggaactttgcgtacaaagcttggtgatgctagtcacttgatcaaaaccattcgtggcgtgggctaccgattggaggaagaaaatggttaaaaaaatctttcgctcaacactcttcgtcactttaggtatcctattgtcagcaactcttttgataatgggtgtactttatagttattttacgcaagttcaaaaagaacagttacaaacagaaactgttttagttgctcaaggtgtggcactagaaggtgatagttattttaacacattaaatgtatctggtcttcgtatcacatgggtagataacgaggggaatattctttatgataatcagtcagatgctacaaagatggataatcatgctaatcgtaaagagatcaaagaggcgttgaaagatggttatggtgaaagcactcgttattctgctacattgactacaaaatctttgtatattgcacaacgattggatgatggcacagtcattcgtttatcgataacgcagcatagcattttgctattatttatcagaatgtttcaacctttggcattgattattattttagcaatctttctatctgtatgggtggcacgttatacagcaaaacgtgttgttgcacctttaaatgatttgaatttggatcagccattacaaaataatacttatgatgaaatttcgccgttgttgagacgaattgattatcaccaaaaggaattagctaagcaggaagctttacttaaccagaaaagagacgaatttgatacgattatttctaaaattaaggaaggaattatcctattggatgctcaatgtcgtgtcattagcattaactcggcagcacaagagctttttcaaacagatcaaagttgtctaggaaatgatattttacaaattacaagagatttatcgtttaatcattggttagaatctggtcttcaaggtaataagcaagaaggtgttttacagtttgaccaagaaagttataaagtgcttattcgcccaattttgtctagtggtgttgtgacaggtctagttgttctcttggttgatgtgacggaacagttacaaattgaaaaactgcgtcatgagtttacagcaaatgtttcgcatgaacttaaaacaccattacacgtgatttcaggttattcagagatgttagtgaatggtttggtatcggctaatgacattccgcattttgctggaaagatttataacgaatcacagagaatggtgcagctggttgaagatattatcaatttgtctcatttggatgaaacagaccaagtaccaatggaaaagctggatatttatgctattgcacaaaatgtattggaaagtttatcaacgaaagcaagccaacgtcagattggtttgcatttgaaagggcagccaacgactattactggtaattcggcgcttatccattccgttttgtacaatctttgcgataatgcgattacttataatcgggataaaggcgctgttgatgtaacaatatcgtctaatgaggataatgtttttttagaggttaaagatactggtattggcatctctaaagaagagcaagaacgtatttttgaacgtttttatcgtattgataagagtcgttcacgaaagcttggtggaacgggtttgggcttatctattgttaaacacgcgctgaaattacacgatgcttcgatccatattcaaagtcaattgaatcatggaacaaggatgttgcttacttttaaaaaatagtcaaaagaggctgaagcaaaaataaactgcacctccaaacgttagacaaaaatctaacgatagaggtgcagttcaaagtgccaggcttcctttgatacttagttacgactgtaagatgtagtggtggtttgcaattgtaactagataataaaagaggttgagaactttttgtctcagcctctttttcactctctttgatttattctattgttcgactggcagttcgatgcttgattggtctaaatcaactgtcaaaatgtaattgctattgtcacggatagtgtgctcaaagtctgttgtgtagagaagcacacggagagtgtcgcctttttccaatttgtagatacttggttgaagggtgaaatcaatggtcatccactcatttgcaggaatatcttcgattgttaacaaatctgtacgattttgaagatttagaacaccctttgtgatgacacgttctttggctttggtaaatggcaattctttgagagcttcacgtgagaaattgcgtccattatcaatagcgtataaatcaagtacagaaggaacatctttaaaacgtttcttttcgccatagtctaggacttgggcagacagaattcctttattttcactagatttgacggttaggtgtagagtgatttgcccattgatatggtaatcgtgttcaatcggtaaatcgaggcaaatggcatttgcttttccagtaaataactcactcttgaaagttctgaaattcttgctataacgttcaaattcagctttggcgtaatgattgtcaatgattttttggtctgtaccaagagctaaagttgcttgattgttactgccaaattcagctaagcttgtccaagcttgttcttggctattatcttgccagataagtgttggcaaaacgaaatgattatcttgtccaagcattttttcagaaagtaaagtgttcatgctttcacggaaatcaatggattgccagttgtgcatgtagacatgctcaccgtggtgaagaaaagcgtgtttttcgacagtatctggaagggcattgaaaatattgaagatgtgacgtggtttgacattccagtcttggagcccatgagtgaatacgcaggttgctttaaccttgtcagcgtgtggcagataattacggtcatgccaaaattgattgtaatcaccagaagcacggtcgagttgcgcagattgctcgtcaaggagttcttggtaatgtgcattattacgaagataatcgccagtcagcagattacgtgaataagtcaattcggtcagcacatcaaggtcctcaccaggatagccgccagggctgcaaaccaacccattttcacgataataatcataccaagatgaaatagctgattcagcgatgataactttcagcccctcaatacctgtcgttgctagagcggttgacatggttccaagataagattttccagtggtacaaaccagtccactcgcccaatcagcaacaactttttggtcacgacggtggctagaaaaggcgattgcttttccatttaaccaatcaatgactgctttaaaactttccacttgcgcataatctccgctggtcataaaaccgtcagagcctgcagttccaaccccagaaacgtagatatttgcgaaaccacgtgcaaggaaataatcattgagcgtgtaggggtcaataaaattgaaacgttcttcactttctccgacaggaaggtcaacatcaggaacagctaacgattcaaagtcacgtgtttcaacgttgattgttcgtgctggttttacagctaaatcaccttccattttgtaaagttttttatcgttagcaacgacatttgttccttggtgataaggactagctgtcatcatggttggcaattggtggcttgttttagggcgaataatattgaccttaatcaaatcgagttgtccgtcttggtcagtatcaagcggtgattgcacataaacaacttcacgaatcaaatcagttgtatcaaacgttgctagtgatttgccattgaaaaaatgataatcattgtctactggaataagccccttactaattaaatcatcaagcaaggtcataccagatttttggcgactaactagcaaatgataaagtgcctcaaggatgtgtcctttttgataattaatcggaaaggcaattttttctaaaaagtcagttgtatttgtaaagtcaacatgcggaataaatccgagaagttgtagtgaaatagtgtaaaaaatatccgctgtcaatggatgttcagaattaaaaaatgttaataaatctgtctcaaaatcagcgattaattgacgaagtgggtagtccgtatctttgtaattaaagaaaatcttacggcagaaattttcgagagcttttttatcagcttgttggtggataatatcaaatcccaaagcttgcaactcttgctctgcaatagcgataggtcttggaatgaaagagaattgattatatttcatgaaactttcccttctaaaaagtaaacgttttaattttacagataacctttacattatctattatacttgataaaatgttagttgtctaaactatattttttcggaggaaacaaaaaaacatggatgttacatggactgtgaaatatatcacagaatttatcggaacagccttacttatcattcttggtaatggtgctgttgccaatgttgaccttaaaggtacaaaaggaaataactctggttgggttatcatcgcacttggctatggttttggtgttatgattcctgctcttatgtttggtaacgtttcaggtaaccacattaacccagccttcacacttgcacttgcagtttcaggattgtttgaatggtcacatgttccacaatacatcattgctcaattacttggtgcaatgtttggtcaattgcttgtcgttatgacacacaaaccatattatcttaaaactgaaaatccaaatgctattcttggttcattctcaactatctcagctgttgacgatggtacaaaagaaagtcacaaagctgcttggattaatggtttcttgaatgagtttttaggttcattcgtacttttctttggtgctatggcgcttactaaaaactactttggtgctgaattgattactcaattaactgattacggttatgattcaactacagcagcaagccaagttgcaccttacacaacaggttcacttgctgttgctcacttaggacttggtttccttgtaatgacacttgttgcatcacttggtggtcctactggtcctggtcttaaccctgcacgtgaccttggtccacgtatcgtccatgctttgctccctaaatcagttcttggtgaacacaaaggcgattctaaatggtggtattcatgggtaccagttatcgctccaattcttgcaggtatcgcagcagtagccttattcaaactcttgtacctataagaatgagacatataggagaccttcgggtttcctttttattgttgatcgattttcaacaattttgttttgaagattgttgaagtccaagccagccatgcttcgtaaataataactacacaaataaaaaataactcatttttctacaaaaaactcctaaaagagtataatttcttgtcaaactaaataattttttctaaaatagaagagacctagtccttattttgtaggaactgtattgaaaatttaataaaaaacattgtgaggagacagttatgactttatttgacgaagtcacgtttaggcatcccgttttgcgaatcaataatcgtgaccacaacattgagttttatcaaaaattaggttttaaactagttaacgaagaaaatgcaattgctgagttttcaaccaaacaaaaaaatgctcgttttgttattgaagaatcaccagcacccgatacacatgctgttgagggaacaaaaaaagttaataagattgttgttaaaattccgaatgccgatgaagtgacagctatcttaggaaatggtattgctgttgagcgtctctttaaaggtaaaaatgggtatgcctttgaaacgttatcaccagaaggtgacctttttcttttacattctgaagatgatattcaacaattaactgaaatcgatagtgtcaatttccctaaaaatgatgagttaaaagaagtttctgactttagcttcgaaagtatgacacttaacgtggctgatgaagcagctgcgcgtgctttttacaatgatgtctttgaaggacaatttccgcttgatatccaatttgtgcaagcgcaaggtgcagatttagccgttaacccgcttgaaacttgggatgtggaaattttagaatgtcaagttcctgacaattatgatttgaaagctttggctagctttttagaaaataaagggcaaactgtttatttggataaaaaagcgagtgtcttagtactttctgaccctagcaatattgaaatttggtttatcaaatgacaaacttgttagaaattattaataaccagatcaatcgcaatatttaccatggagctagtttagctctttttaaagacggccaatggtcagaacattatattggtacgattgacggtgtcgctcctgtaaaatctggcttgatttatgatttagcgtctgtttccaaagtagttggcgttggaacagttattatttctcttttacatcaaggaaaattagagttggatgcgcctttggtgcggtattatcctgattttcacgagtcatctgtaaccttacgacaacttttgacacatagtagtgggataaatccttttatccctaatcgtgataatctgaatgcagctgagttgaaagaagccattaatcacattactgtggagagcaagaaagagtttctttacacagacatcaattttcttttgcttggctttatgctagaagagatttatggcaagtcacttgatgtgatttttaaagatgaagtctttcagccttttggcatgacaaatactggttttggtccagtaaaaaatgcggtgcctacggttgctggcatcggtgacgggcttgttcatgacccaaaagccaaggttcttggtgttcattctggttcagcagggttattttcaaacctgcaggatttagaaaagttttgtcagcattatctaacagatgattttgcgagtgatatttggcaaaatttcagtcaagcgaataaagaacgttcgctggcatggaataaagagggcgattggcttgaccatactggttacacaggcacttatgtgacaatcaatcgtaaggagcaaaaagctgctatttttctgactaatcgtacatatgcttatgatgatagacctctgtggattgaggaacgtcagagaatttcacaatggattcagcagaattattaaaaaaacagatatttctttgaaaacgttttgtttttcccagcctttttagcccgaaagtgctataatgagggtgataaaggaaaaggaggaacaagattatggcaaatgtactaactgttgtttttgatgttgaaagcgaagcctaccaagctttttcagaactaaaatcattcaagcaggataatgatacgcaaattgcacagattgcattggtgaaaaatgaagatggtaaaatcactatcaaagattctattgactttgatgatgctagtcgtgattatgcaactgttggcggtattatcggcggtctgttgggcattttgagcggtcctatcggtgttattattggttatggtatcggtagtcttgctggtgcagcaagtggaagcatgactgatgcgagtgacaatagcttgattgaagaagtgacaacaaaattgcttgatggtgatgttgccgttattgctctagttcacgaagaagatgaaagtattttaaaccatgtctttgctccttataaaacgaatattatgcgttgggatgcccttgctctcgcacgtgaagttgagcttgcaggacaagtccaagatgaattgtacgataaagttcaagaagatttgaacgaacgtcgtctaaatcatctcaaagaacaaggaaatgacatcgcagatgctattaaagcaactttccgacgactaagaggaaaagaataactttaaaagttttgtaaaagctggtctatcagcgtattagaacttattcagtggtgattacttaaatagttgaaaatattgtttgaggtttggaaacctagcttgcaaagcaagtgttaaaaagtgcttaatcaattgtgaatgggaaactctaagttgactaaagttggcaatttctgtttttagatttcttgacagcgacctttaacagttgatttccagattcttgaagtccaaaccactgcattttgcttattacagctatataatagcgaggctgagcacttttgtctcagcctcgcttttgttatgtcaaattgcaaatttgcctaatataatgaatctaagccagtaagccgttaaagagttttataatgatttttccatactgatgtgcatgataccagcttcttcaaattcttcgccgaagcaagtaaagccaagcttgtcgtagaaaccttttgctgttaattgcgcgtgtaataccatgcgtttaaagccttgtttttgacagaattgaatcacatcctctaagagaagttttccaagattttgtccttgataggctggtagtaccgccatacgttgtagtgtcgcttcactatggtctttatttggcaaaatacggcaggtagcggcagcttgacctttctcatcataaaggacaaaatgaaggcaataagcctcgttctcgtcgatttcaagcgacattggcacaccttgtcccttaacaaagactaattggcggattctgacagcgtctagatatgtatctgataatgtatttcgtgtctgtttgattttcatagctatattttaaaagcaaaaaaagaccttgtcaactgacaaagtcttttcttctattcttattttccagcaacggcttcagcagcgtcgtccattgaaaggacttcgtggaagacacgttgtgtcaattcagttttttgttcttttgtaagatatttagtgttgacacagtaaccagagatacgaacgataacatcttcaccactcataatcttgtcatagacatctttaaggtccataacgttcaagttaacgtgttgtccaccgttttcgaagtaaccatcaaggatagttaccaagttatcaacttgttcatcgaatgtcttaccaagggcacgtggagaaacttgagttgtaagtgagataccatctgcagcgtatgagaagtcaaggcttgcaagtgagttaagattttgcaaccaaccaccacgagctttgttagatggattagcacctggagagaagaattcaagtttagaaaggttcacagtgccatcttcgttaaggtaaacacctttgtggactggagagttaccagtttgtttagaataagcaacgtttgaagtgattgtaagaagtgatacagtagcttctgcatccttgtagagtttgtggctacgaagacgagtagtgtatgcttctaccaaccattctgccaattcgtttgaacgagggtcatcctcaccccaacgagggtagtcaccagttgtttcgtaatcgtagatgtaaccattttcatcacggattggtttaacagtagcgtatttgattgctgacaaggtatcaacagtatttgcaaaaccacagataccgaatcccatgttagcacgttgttttgttggtaagaatgccatttggacagcttcgtagttgtacttatcagtcatgtagtgaatgatgttaagggcatctacgtaagttgaagtcaaccaatcaagtgatttttcaaagttagctttgacagtttcaaagtcaagaacttcgtcacggacagggtcaatatcaaagactttgtagtctttgtgaacatcgtcgtaaccaccgttcaaaccagtaagaagagctttaaggacgtttacacgagcaccaaagtattggatgttgtgacgttgttcttcattttctgggtcaagtggtgatacacaacatgagatacatgacatttcaccataaccgtctttagccattgttgtcacaccttcgtattggattgaagagtgtttgtgtgacattttcatacagtagcgacggaatgaatatggcaatttgtcagtccagagaactgtcaagtttggttctggagcattaccaatattatcaagtgtgttcaagaaacggtagtccattttagtaacacggtgacgtccgtcagcacccataccagccatagaagttgtgatgaatgttgggtcacctgagtaaagttcgtcgtaagcttttgtacgtgcgaattttacagtacgaagtttcaagacaaaatcatcaacgaattcttggatttctgattctgtaaatgtaccacgagcaaggtcacgttctgcaaagatatcaagaacaattggcacacgtccaagagaagttgcagcaccgttgataacacgacaaacagccataaatgcgatatttacccattggatagcttctttaacgttcatcgctggtttgcggacatcaacaccgtaaaggtcaccaagtttgacaacttcaccaagtgcttggtattgcaagttaacttcttcacgaagacgaattgattcttcatcaatttcagtaattgcattccagtcgttggctttttctttcatcaagtagtcagcaccgtaaagagcaagacgagcataaacaccgatgatacgcccacgagagtaagcatctggaagtccagttacagtgtgtgcgtgacgtgcacgacggatatttgatgtataagcacggaagataccgtcatttactgtagttacgtgttttgtaaaaatttcgtgaacagctgggtcaggttcatagccatgttccttgagagctgtttctgccatacgaattccgccttttggcatgaaattcagtttgaataactcatcattttgaataccgtagattagttcgtcgtcttttgaaatatagccggcaggaatatctgcgattgatgttggacgagtatccattgggaaacgagtttcttcgtagtgagctttagtttcttcaatgatttttttcactttaagtgaacgttctgtagcaggagctaagaagctttcatcaccatcataaggtgtgtagttagcttgtacgaaacgagaaacgctggctttttctttccagtcagtacctttaaagccttcccaggctttttcaaaaacatctgtattagttttaacagtcgccataatgagatttctccttaaattctagtaacagaccatctgttacatttacaagtatagtttatcacaaaggaagcgttttccaaagcagaaaactcgcaaaaaacgataatcttttctagtacagtttcataaaaaatacttaactgtactagaaatttgtaagtttggttgaaaaccatgaaaattgttataatagattcagaaacaatcagaaaggacaggcttatgttgatttttcctttaattaatgacacttctcgaaaaattattcatattgatatggatgccttttttgcgtcagtagaagagcgggataatccagacttgaaaggtaagcctgtcattatcggttctgatccacgaaaaacaggtggacgtggtgttgtttcaacttgtaattatgaagccagaaaatttggtgttcattcagccatgtcctcaaaagaagcttatgagcgttgtccgcaagccgtttttatctcaggtaattatcaaaaataccgaaaagtcggtatgcagattcgtgagattttcaagcgttatacggatttggttgaacccatgtccattgatgaagcttatttagatgttactgaaaataaactcggcatcaaatcagctattaaaattgccaaaatgattcaatatgatatttggcaagaagttcacttaacctgctcggcaggtgtctcttataacaaatttttagctaaactcgcttcggattttgaaaaaccgaaaggattaactttaattttaccagaagatgcccaagattttctaaaaaaacttcctattgagaaattttacggtgtcggaaaacggtctgttgaaaaattgcatcaactgggtgtttttacgggagcagatttgttggaaattcctgaaatgaccttgatcgatctttttggtcgctttggctatgatttgtaccgtaaggcgcgtggcatttcaaattcgccagtcaagtctaaccgcattcgcaaatcaattggaagtgagcgaacttatggtaaattattatatgaagaagatgatgtcaaatcggaaatttcaaagaatgcccagcgagtggttgacacgcttcaacgtaatcgtaaagttggtcggacaattgtcttaaaagtgcgttattcggatttttcaaccttaaccaaacgaataacccttgatgatgtcaccaatgattttgaagtgattgaccaagttgctaaaacgatttacgatagcttagacgagtcaaaattaggtgttcgcttgttgggggtgactgtcacaggtttagaggataatatccaacccttgaatttatttgataattaaaataccgccttagtaagttgctgagacggtattgatttttatagattataatacttattcagcttcagtgacagcctcgtcattttcctcttcgtctttatctaataattgccctgcttttgcatagacatagccataaagagctaggaaaataactgggagaaggaaagttgtaactgataatgtgctacctaaaatgactgcaagaataatgcccgctacattatagataactgtgtaaaccaaaccaaggcggtaaggtgtcaagcttggagcatcttctttgatttttggtaaatttttgaacgctaagaaggcaatggcaatatttgcaatcaaagcaacaatcatgataataacgttccagatatttgtagctgccacgattgtttggtaagtatcggcatcataagtgcttttaatggtgtcaagattattaagtaacgtgaaatagctgataatagtaaagatttttgcaaggactgcaagaacatttacccatgcaataaagagcgtccaagaacgcaatgattgacgaattttttcataagaaaccatatcaaacctcctaaaacaatggttatactaatgtgatagtacaaatattataacacaaaatttttctctgtaaatagctttttatcaatacttagtattttgataaagcttgtcgtttcaagagattggactgttttaaatatcaaaatattttaagtatagaagctttgaaacacttgtatcacattctgagttataaataaccccatgattttgagcatcatggggtggctgttatttcttaaaaaattgttcaatgtcggcttgggtaatgccaatcattgggttgataaatgccaagttttcttctgtcaagcgatagatttttggttcttgctctgtttgtgtttgctcattttcggcaatatctagtgtcagttgaatgttttcttctttagaaatatttgtttggggagaagttggagaggtgattttctcagcttcattatctgttttaggtgatgtttgttgagaaatttcagtttgtaaatcaatactttcttcttcttgagcggagcttgtaaagcgttgaacaagataggtgttgcgcttagcgccttcgttttttatggcgtaatcaaaggcggcaatttcccctaacatcactaatttactcttagagcgggtgatagctgtgtaaatgaggttacgttgtaagagtcggtgactttggcgagtgatcggcaaaatgacaacctgaaattcgctcccttgtgatttgtggattgacatggcgtaagcaagggtgattttatgccattcattacgagggtagataacttcggtgccgtcaaaagacatgtaaagttcgtcttgtttggattcggtatatttagcaggaataaggtctgtaatatagccgatatcaccattgaaaacattgagttcagcatcgttgatgaggtggagaactttgtcacccttacggaaattcatctcaccaaaggcaaacgagagttgatctttaagcgggttaagtaaatcctgaataatgatattaagtcgattaatcccagctgcgccacggtacattggggcaagaatttgtatttcttgtgggtcaatgccactcttaacagctgcgctgacaattttaggaatcatttctgggatatattgtgcacttgcttcaaaataagaacggtcagctttcttttgtgtgaagtcagctggtaattttccaagtctcatctgattagcaagtgtaacaatggttgaatcttccgattgtctaaagattttagtcaatgctagttggggaagagcttcaatttttaataaatcagctaatacttgcccaggaccgacagacggcaattggtcactatctccaacgatgatgacttgagtattggacgaaatggaactaaagagttgattggcaagccaagtatcaaccattgaaaattcatcaatgataatcaagtcacagtcgagatagtcatcaatagcttggtagtcgttatcaccatttaaccccaaatggcggtgaatagtcgcacttggcaagcctgttaattcattcatacggcgggcagcacgtcctgttggcgctgctaagatgataggaatatctttcttttcaaggtcaatatgatgaaggtctgcgtaggcagcaatcaaaccgttgataacagtcgtttttcccgtcccaggaccaccagtcaaaataaacaccttgcttttgagcgcttctttgatagcatttttttgcacatcgtcgtaagaaatgccgaaagcttcctcaacgtcagcgatttcttcttgcaagtcatcatctgaaaagttttggtcgagtggcgtatcaaggatacgtgtcaagtgttttttgatacctgattcagcatagaaaagagtattgtcaaaaattttggtaccgacattttgcaccttatcttcggcgataagcgttgataattctttggcaacggctgcggggtctaactcaatttgtctagcttcttcaagggtggtaatggcattttcaagcaaatcacgcgcttcgacgtaagtatctcctcgttcaatagaagtttcaaaaagactgtgcacgagagcagcacgaaaacgttgaggggcatctgcttcgattcctaattgttcagcgagttggtcagcgattttaaaaccaatcccttgaatgtcttcgaccaattgataaggattttcttggataatatcaagactgtcttccttgtattgattaaaaatttcaaaggcaacgcggttagtcaagccatactctgctaacttggataaaatgagctctgtaccataattaagcttgagtttggttaaaaagttgtctttattttccttagagagcccagaaatactgtctaatttactagggtcttctaggattttatcaatggtattgtcgccgtaaagctgcacaattttttcagcagtttttttaccaattcctttgaaatggtcgcttgaaaaatatttaataagaccggaagaagttggtttgctgcgctcgtaacgtgtgactctgagctgttcgccatattttgggtgttgcgttaattcaccccaaaacgtataattttctccctcgataatatcagcaattgttccagtaacaatgatttcaaaatcatcaaagtctgaatcagtatcctcaatttcgagtaataaaattttaaagaaattactggcattttcaaaaataatacggtcaattgtgccagaaaagaagtattccataacgtgtccttacttgattactataatggttttattatatcattgctaatcagataaacaaacttttaatctgtgggggtgaagaaaagtctggaacaaagagtccagacttatttattaattaataaagccgatttttgagagtggccagaagcggaatttgacttcaccgacgatgtctgatttagagaaagttcccacttcacgactatcttttgaaacgatacggtcgtctccgaggagataatattgtccttttggaactttgactgtaaactcggtattgccatcactatcagttgtgaaagcatctgagctttcagctaactcttggaataaggtattgtacgaataagtatcttgcagttggtcgttctcaaaggcttttttatattcgtctaagtagtcctcatcaacttttttgccattaacgtagaggacatcatttttataagtaatggtatcgcctggcataccaatcacgcgtttaacaatttcttttgtcttaccgtcctcggtttctttagcaacaacaatgtcaaaacggtcaatagatgtggttgataggacaataagacgctcaccgtcagctaacgttggatccattgaatgaccgtcaacttttacaggttgccaaataaaggcacgactaagtataagaataagaaagaaaaggattagtggtccccattctttaataaagtgtttcataaatcttcctctacttttatttttttaataatgcttgcgctttttgggtatttgcaaaatgaagcttggcagtatgttctaagccagacatgccataggctgctaaaatttgacttgcgactttatctgactggctaccagcaccgcttgggagtttgtattgcacctcttggctaagtttgtcgagattttctaagaaaaggttgcgagcgatgattgagctgacggcaactgccaaatattttccttcggctttttcttcgagtgtcagcggattagcaaattgattggcttcatttttaaggtatttttgataattttgccgactggtaaaagcatcgataacaattttttcaggcttgacaccgtcttggagaagtagataaatcgcttgattgtgaagagctaccttgacagagacggcgttgtgcatttttcctttaccgacgacttggttgtatttttgtggggacaatagcagagctttatgcttgatattgttttctaagactggggcgatttgacggattttgctgtctgttaagttcttggaatcatctactccaagctttttaagcagggcatggtcatcaggggtcacaaaactagcaacaacagccagtccaccaaaataagacccattaccaacctcatctgagccgataaggggcatattctgaccactaacggtgtcacttgttgactggctagctgattgatagccaaattgttcagctatagtttccgcatttgcgccctgaaagacgactttgccagatgtgtaaacaagaaccgtaacaccctttacttttgccgcaaaagtgacatagggattgttattgttgacttgctggctagtcagtgcctttatcagattttgcaaatcatctttacccattttcataacaatggtattcatgattttattttatcataaaaacgctctaagagggcaaaacagctggcagaaagtgagaaaattgagacttaattactagattaaagaaggtttcgagaagccatgtgttttttaccccaatcaaacagctctcctaaagtgttaatcagctcttttcccaaatctgttaaatggtaagtgacagaaggtggaacagtgccatagtcatgacgtgtcaataaaccgtcattttctagttcacgcaaacttttcgttaacattgtgttagtaatgtctccaacttcgcgttttaattcattataatgcaaaccgtcttttagcattaaatgccacataatgggaattttccattttgagccaatgattttcatagaatagagaataggacagtctttcggcatattgtcattgaaatattgtattttttggttaaaggttgcttgatccataatgaactcctttagaatttttaaggaagaaaaaagtgcgtacttgtttttttctttttacgattttataataagctcatcattaggtaaagtcaagtgatattgatagttacccattgaagggaggaaattagatgaaagccaaatacaaaccgttatttgttccatacgagctcaataatggtgtgattttaaaaaatcgtttagttgtggcacctttaacaatctatgattcaggagctaatggtgagctaacagattctgctaggcgtttttggaagaatcgttttgagggatttggaatgtatattatgccatttaccaatgttcatccgagtggtatcggttttgaatctccaaatgcctatgacgagagccatttagataccttaaaagagtatgctgaaatagctcatgaacaaggggctaaatcaatcgttcaattagcgcatgctggaatccgagcaaacaaagtaatgacgaaaggttatgatgttatcgctcctacggcagacttgttaaatggtgctagagaattaacgagcgacgaagttgaggaattagtcgcaagttttgcttatgctgctgaattagcattgcgtgctggacatgatggcgttgaaattcatggcgcaaatggctggattattcaacagttcttttcagctaattataatcagcgtaaggattattggggtggttctttagaaagacgtctccattttccattagctattgttgatgctattgatgcagttcgtcggaaatataaacgacctgattttattattggctatcgcttttctccagaggaacctggcgagcaggggttaacaatgcaagagacttttgctttggttgatgaattattgaaaaagcctttgcagtatcttcatgtttctctttgggatttttataagcatgctagacgcggtgccgatattagtaagacacgtatgcagttgttgcatgagcgtattgctggcaaagtgccacttattggtgtgggaaatctatacaccgcagatgatatgataaaagcttatcaaacgggttatgctgaccttttagctgttggaaaaagtattttactaaatccgaatttaattgaacttattcaatcaaatcgcgaatcagagatagaaacagagtttgactgggaacgttttgaaaactatcgttatacacctgcgatgttaaaaggaacaatgcaaggattggatttttacccaccttcaaaacaatatggtgttcgctatataacagaagagtattaaaaggagactattatgacaacacaaagtatcttaaaacaacgtgtatcatcacgtgatttttcaaatcaaaaagtagctattgatgatatcaaggcaattattgctgaggctcaactagctccgtcttgggaaaattctcaaccttggaaagcctatgtggcaactggaaaaactttagaagccattaaaaaatggcattttgacaatgtaacaaacggtgttaaaagttgggttgatattatgccacctcaagaatggcatatccatgccaaagataacattgcagcttgggaaaaagctacacaaaatgatttaggtgaaaaaggttggcaggatttttggtcagctcaaagtcatttcttcaatgcaccagcagttgtttacattactattcctaaagattcgacacattactcagcttatgatgctggtgcttttggttatggtattttgcttgccgccgctgagcgtggattggcaagtttgcctgcttacgaatttattcgttttccaaaagaaattcgcaaacagttggaaatttcagaagaagaaagtttgttaatgggaattgctttgggatatgcaagtgataagccgttaaatgacctgagaacaacacgaaatcctttggatgatattcttaaaatttctgactgatagttttagttataaaggataggggatttagatgtcaaaagatagagttattgcttttacggatgcgattttagcgattgtcatgactattttagttttagaattagaaaagccagcagccgctacttggcaagcaatttgggatttaagagagaatttttttgcctatgctatctcatttttctggcttagtgtgatgtggataaatcttcataatgaatggcactatgttaaatgtgtctctttatccgttctatggtggaatgttctcttacttttcacatcttctctttttccttatgtgacgagttttgtgagcttgaattttcaaagttctgttgccgtcgctttgtaccttttggctgccttatctgttactattgtcttttatggtctggcaaatgctgttcataagacaaatcctaatttaccaaggaaatattagtgacttacgataggacgagcgcagttgatattcctataaaggtggtggggcttttgttagcagtctttatctacccgccattcggactttttagtgtcattcttagcgctatttgtgtcgttttaaacatacaacttcatatcgttgatgataatcattaatttctaatcgttttatttattgctataagctaaaaggaggtgaagcaaaattggcttcatcttcttttattatgattaaacgcttaaataaagacagttttccgtgcttacattttacgaaatgcttattttaaggtataatgtcaaggaggtgactatatgaaaagtaaaaatcgttataaattcgtctttggtgacaaaccactcacattgacaacggataaggataatctcttcatggaagaggttgagcgtgtagccaaagaaaaatataatactatcaaggaaaaattaccgcaagctgataatgaaacgattgctattttgatggctatcaattcgctttctactcagcttagtcgtgagattgaagttgaaaagatggaaaaagaattgacggctcttcgttctgaagcgattgtagatattaaggagaaagccagcaagtctgattccgatgaggattaattatgttatcaattcttcttgtattgattttaatctggcatttttatatcggttattcacgtgggattattttgcaaacctactattttatagcaagtattgtctcacttgtgattgctagccagttttatcaaacattagctgaaaaaataacgctgtggattccctattctaatgctagtcagggagcaacggtgaattttttcacggacgttaatatttttgatttagaccaagtttattatgcgggagtagcttttacagccatttatgtggtggtttatttgctttttcgtttcatcggtattttggtgcatttggcgccaatcaatcactttgataatgttaaaatgaattgtgtcagtggtgttttagcgattttagtcacactgatatttttcaatcttgtatttacaatattagcgactgttcctatgacgacggtgcaaaatattctatcaggcagctttcttgtgcgcgtgattgtcaatgattttccaccgttatcgaatattataaaagcgttatgggtaacagcaattctaggataataaaggagtctggggtaaatcacctcagacttgttcaatatataataaaagcatcagcgtgcctaggaagcacgagaaaagttaggtttttggtataataaagatatgaacaacagaattttagaacagttagaatttgataaagtcaagcaactttttgctggctatttacagactgagcaaggccaagacgagttacgtaaacttgagccaatgactgagcctgaccgcatttcacgttcttttgatgaaatgtcggacatggaacagattttcattgaacaccattcttttggaatgggcagtttgcgtgacatctctgaaagtatgcgtcgcttggaattggatgctgacgttaatgtctcagaaattatcgacatcaagaaagtcttgcaagtctcagctgaaatcaaacatttttataatgatttggaaaatgtagagttgtctgcattaaatactctttttgagaaaattgaattgttgccaagtctgcaaggtagcttacaagcgattaatgacggtggtttcattgaaaattttgcaagttcagaattggaccgtattcgtcgccaaatcaatcatgacgagggtagagttcgtcaaattttgcaggatattttgaaaaaacaagctgatcatttgacagagactttgattgccagtcgtaatggtcgtgcggttttgcctgtaaaaaatagctaccgcaaccgtatttcaggggttgtacatgatatttcggcatcaggaagtacggtttatattgaaccgcgcgcagtagtgcaacttaatgaagaaatcacgcaattgcgagcagatgaacgtcacgaaatggcacgtattttacgtgaattgtcaaatatgcttcgcccacatactaatattattcgtaacaatgcgtgggttttagggcatttggattttgttcgtgctaagttcctcttcatgcaggaaaacaacgcaatcgtgccacaattatcagcagataaaaccgtgcaactattacaagcccgtcacccgcttttgatcgatccagtcgccaatgaccttcactttcttaataaattgaccgttattgtcattacaggaccaaatactggtggtaagacagtcatgttgaaaacattgggcttagcgcagcttatggcacaatcaggtttgccaatcttggctgacaaaggtagtaaagtcgccgtatttaatgagatttttgcagatattggcgacgagcaatctatcgaacaaagtttgtcaacattttcaagccatatgacaaatattgttgagattttggcagcagcagataaagatagtcttgtcttggttgatgagttgggagcaggaactgacccacaagaaggtgccagtcttgcgattgccattctcgaacaccttcgcctcatggaaattaaaaccatggcaacgacacattatccagaattgaaagcttacggtattgagacagaatttgtggaaaatgccagcatggaatttgatacagagacgttaagtccaacttatcattttatgcaaggtgtaccagggcgctccaatgcctttgaaattgctcgtcgtcttggtttagcagagattattgtcaatgaagcagagcgtttgacggactctgatacggatgttaaccgcatcatcgagcgtttggaagaacaaacccatgaaagccgtaaacgacttgaccatatcaaagaagtggaacaagataacctcaaattcaatcgtgcggtcaagaaactttataacgaattttcacatgccaaggacaaagaacttgaaaaagctagcgccaaagcgcaagaaattgtggataaagccatggcagagagtgaagaaattctcaaaaatcttcatgatagagcaagtcttaaaccgcatgaagttattgaagccaaaagtcagctgaaaaaattagcgcctgaagttgatttgtcgaaaaataaagtcctcaagaaagctaaaaaattgcgcgcaccgcgcgtgggtgatgacattgtcgtcacagcttacggacaacgcggaacattggttaaccaagggaaaaacgggaaatgggaagtgcaagttggtcttattaaaatgacacttaaagaggacgaatttacccttgttaaagttcaagaggaagcccaaaagccgaagaaaaaacaagtcaatgtggtcaagaaaagcaaaaaagcagctggtccacgtgcccgccttgatcttcgtggtaaacgctatgaagaagccatgcaagaattggatgaatttatcgaccaagccttgctaaataacatggcacaagtcgatattattcacggtatcggaacaggtgttatccgtgaaggtgtcacaaaataccttcgtcgcaacaaacacgtcaaatcatttggctacgccccacaaaacgcaggtggcagcggctgcaccattgcaaatctaggttgaagatagaaaaagtcttttttcacaattcagaataactaccaaaaaactcttcctgaaatatggaagagctttttgcttgtagaaaatgcacataaaatttatttttgtccgagtagaatcatttggtcaatagagcggcgtgcaccgttgattgtttcttcgtctagggtgatttcttcgcctgcttgaccgagtaggcaattataaatgtcagctagcgttgtcattttcatattgtggcaaacgcactcggttgatagcaaatagaaacgtttgtctggacattcgaattgcaagtgttggacaatactgctttcggtaccgatgataaattctttttcagaactgtttttggcgtaagccatgatttctgtggtacttcctgcaaagtcagctaattcggtcacctctgctagacattctgggtgaacaagaactttggcatttggatgttcttcacgtgcacgaataacatcacgtttacgcatgcgcatatgcgttggacagccacctttgaaaaattcaaattgcttatcaggacattgttcagcgacccattgtccaagattgcggtctggaacaaaaaggattttatcattgtcaatgttactgatgattttgacagcagaagaagatgtcacacaaacgtcaacaagtgtttttacttctgatgttgtgttgatataagcaacaacggtgtaatctgggtgagcttcttttaaccagctgactaactttttatcaatttgcgcagccattggacagccagccattggatttgctaggatagatgttttttcaggagatagaaccttgacagtttctgccatgaaacgaacgccacacatgataattgtgtcttgtggtgctttggcagcgtatttactcaaggcaaaagagtcaccgacaaaatcagccacttcccaaatatcctgactttggtaggcatgggctaaaatgcagacccccttttcctttttgagacgtaaaatctcatcttgcatctctcttgtattcattgtagattgtggtatccttccttgaattgtcttagttatatattatagtcctgcaaacgccgggtgtcaagacacctgtaaataaaattagcttggtgtcttgtcaggtgtaaggtttagtggtaaaatgtttcctaagtcgtatgatttaataactaacctattttaaatagtgttaataaaagtgacggttacagttttagttcacttgtaattgtcaaaaaagaaggtttgtatgaaaacaaatgtacttattgtaggtagtggttgttcagggctttatacggcgctgaatttgccacaagaacttcaaattactattattactaaagatacattagaaaatagcgattcctttttagctcaaggtgggatttgtatgttaaaagatgattcggattatgaatcgttttttgaggacactttgcgagctggtcattataagaatgacaaggtttctgttgatttgatgattaagtcatcacctgatgttatcaaagatttgcttgattttggtgtggatttccaacgtgacgaaaatggcaatctagcttttacacgtgagggtgcgcattcggataaacgtattctcttttatcaagacacaacaggaaaagaaatcacaagcagattgcttgctgcggttaaaaagcgtccaaacattacgttgatggaacacacctgtttgcttgatattttagaagaagataatcgttgttacggtggcgtggtgcgtcttgaaaatggtgatttggaaaaaatcacagctgacgtgactgttcttgccagcggtggtgttggtggtttgtataaaaatagcaccaatttcaaacatttgacgggtgatgcgctagctatttctctaaaacatgacattgaactcaaggatatgtcttatgtgcaaattcacccaaccactctttatcaagaaaatccaaaagaacgctcatttttgatttctgaatccgttcgtggggaaggggcactgctttacgataaaaatatgaatcgttttgtggatgaattgcagcctcgtgacgttgtagcacaagctattttaaaacaaatggaaaaagacggcacagaccatgtttgggaagatttacgcaccattccaaaaaaagaattggaagagcattttccaaatatcttggcacattgtcgtgaggctggctacgacccattcacagaatgtattcctgtcgtgccagcgcagcattatttcatgggtggaattaaggttaatcaccacagcaaaacaaccatggatgctctgtatgcggttggtgaaacagcttgtaatggtgtgcatgggcaaaaccgtctggcaagtaattcgctgcttgaaagtctcgtttttgcgaaacgtgcggctaaagatttggtggctcattatgaaatagttgctaaattgccagaaagcttgtcagagctagatttggaagattatcaagaccaagaaagtctcgaagaggactacaagaaaatggtgcttgaaaagttaaccgagcaaaatcaactggctagttatattgtatagtcagaattgagaaaagaaaggataatgatgttagacccaattaccctaaaattaaacgttgaaccgctcattttgagtgccttgtctgaagatattaacaatgaagatgtctcaacgaatagtgttatgcctgaaaatgtggctggtcaagttgatttgatttgtaaagaagatgggattatctgtggcttacctgtttttgaacgcgttttttacttgcttgacccaacgacaacctttgacgtttgggtgaaagacggtgaagctgtcaaggcaggacaacatttgggaaccgttcgtggtgatattcgtgtcttactgtcaggcgaacgtacggctcttaactatttgcaacgcatgagtggcattgcgacttacacgcatgaaatggcaaatctgttgaaagacagtccgattacacttcttgattcacgtaagaccacgccaaataatcgtatttttgaaaaatacgctgttaaagttggcggcggtaaaaatcaccgttacaatttatcagacggtgttctgttgaaagataatcacattggcgcagcaggtggcgtaaaggaggctgttcttgctgctaaaaattatgctccgtctgttcgtaaaattgaaatcgaagttgaaacgcttgaaatggtcaaagaagctgtggaagcaggtgctgacattatcatgcttgataacatggaccatgacacaatgaaagaagcagttactgtggttaacggcaaggcagaaatcgaaatttctggaaatgtgactaaggaaaatctggcttcttatgttgatttgaatgttcaatatgtctcaagcggagcgattactcattctgctaaaattttggatttatcccttaaaaatctacatcctgttgataactgagttgataaatttccaaaagcaaaaattatggtttgaaaaatccccagctctttaaaagttggggattatatgttgataactaaaaaagaaaaagcagtaatccacagacgattccaacgagaaaacctgccatgacatcgcgaggataatgtacaccgcctaaaacgcggcaaagtgcaatcactagggataatatcagaaagaaaatgcccaaaataaggtttaaccgtaaaatagccatgctgataatggttgccgaaaagacatgacgacttggcatagattgtcccttggtattttttaaaataagtggtgtgatgttccaagtctcgtaaggacgaggggcattgagcagcttgcgtacaactgatactagcataaacgaaagagctggaataagaatgaaagcaagcagtctatttgactgtgcgcaaaacaggtaaatgagcattagtggataaatcacatacatgatttttgttaataaactgttgacaacttgtaggcaacgagtggcgcttggtttattctgaaaacttcgtgttagcttgttataaaatgtagcgtaatttttcatagtagtcctttgtgtaataatagcttcattatagcatatctgtcagataaaaatagaaaatgagaattttttcaaaaaatcattttccgtagcaattagttgtcaaatcgacaatttttccgtaaaataggctcataaactaatagaaaaggaaatgaactttaggattgtttagctggttgtagtttactatttttaataaggtattttccagtggcttctagagttctaggtaatttattatggcacataatgttacagatgcgacattcgaagcagaaacaagtgaagggcttgtccttgttgatttttgggcaacttggtgtggtccatgtttgatgcaagcgccaattttggaacaattgtcagaagaaatcgatgaagatgaacttaaaatcgtcaaaatcgacgttgatgaaaatccagataccgcacaaaaatttggtatcatgtcaattccaacattgctattcaaaaaagacggcgaagttgtgaaacaagtggctggtgtgcacacaaaagaacaaatcaaagaaatcgttgctgaattaagctaacgacaaggtcaggggaagctctgacctcttttttatcaattaatgaagttttcggcttgacttagagttaactcaaaggtatataatgactgtgtcaagaggatgaaactctgacaaggtttactttctagatgttgtgaactagaaaatagaaaggtttgattatcatgtttggtgatattgaacttgcctaatgattttgtaaactcatttagaagcgtgggaaacttgtaagtgagagttgttatcccaaattttagaaaggaaaggttcgattgtcatgtttgatatgataattgaacccgccctaccgactgtgtaaaaaagataaatcttcctagatgcaagcatcgtcggtcgatttcctatttttactttgtcgtatacgggctcggtatcttatttatgaaatctgctatttttgaaaaagctggtctgatgactgttgaggaagtggctaagccaactttgcaagctgacgatgatgttattatcaaggttgttcgtgcttgtgtctgcggttctgacctttggtcttatgctaatggtgatgaaaaagctgcacattctgaaaactcaggtcacgaagctcttggtattgttgaagaagttggttctgccattacgaccgtacaacctggtgattttgtcatcgtgccatttactcacggttgtggggaatgtgatgcttgccgtgctggttttgacggaacgtgtgataaccatcctggctacacaaactggtcttctggtttccaatcagaatatgtccgcttccactatgctaactgggctttgattaaaatccctgggcaaccgtctgattattcagaaggtatgatgaaatcactccttactttggctgatgttatgccaacaggttatcatgctgcgcgtgttgctgacgtaaaacgtggcgacaaagtcgttgttattggtgatggagcggttggacaatgtgccgttattgcggcgaaaatgcgcggagcttctcagattgtcttgatgagccgacacgaagaccgtcaacaaatggcgcttgcttcaggggctaccgctgtcgttgctgaacgcggtgaagaaggcattgctaaggttcgtcaaattctcggcggaggagctgacgctgctcttgaatgtgtcggtacagaagccgctatcgagcaagctctcggtgttatccacaatggcggacgtgttggatttgttggtgtccctcattacaataatcgtccgctaggttcaacatttgcacaaaacattactgtcggaggcggttcagcttctgtcactacctacgacaaacaactccttctcaaagcagttcttgacggtgacatcaacccaggtcgcgtctttacaaacacttatcgcttggacgacatcaaccaagcctacaaagacatgcaagaccgcaaagcaatcaaatcaatgattgtcatggactaacctaacgtttaagctgttaacataacctcccgaaatttttcgggaggttttttgttactagaaatagtataattgtagaataatgaaaaaactttgaggggataatatgaatttttacaatttagagtacattactcagcatcaatcatttaacttagtatttaggtcagtgattttaattattttacttatgattgtcatgctcacaagtattcattatatgcgtaataggataaaaacacgcttgcgcgatattagtattggtattgtggtactaatgtttattcttttgggaattcaagttgaagattatatgcaaaataatcgtgacttttcccaatcgcaaatacttgtaaaatttattgagagtgtcgctacggataatgatatttcatcagatgacgtactggtaaattcgacgactttaaaagatggtattattgttcgttacaatgaagaagattacacagttcatctcaatgatgataataattcttatactttggaacgcacacatgtcatagaccaccatgtttatatcaacggaggagagtagcttatggatttgtacgttttaactgctgtaaaatttatcttgggaatgctagtgatgattctacaaattaatattttagggaaatatgaattctcggtgaacacaccgcttaatcaaattcaaaattatgttcttggtggtattattggtggtgttatctacaatagttctgtctcgatcttgacttttctcattattttactgatttggtcgttggtagtaattattgtaaagttgttaattaataataagtttatcaaagctattgttgttgggaattctgtgattttgataaaaaatggtaaggttaatgtggaaaattgtgccaaacttggaatcacagctgatcagctcatgttccatcttcgcatggaaggattgaactcaaccagagatgttaagagtgccatcatggagccaaatggcaagttaacagtcttggacaagaattctgaaactcccaaatttccacttatcagtaatggacgtattaactatgatgtgcttgaactgattgaccatgaagaagagtggttatttaatatgcttaatgagcaaggaatagaatccccaaaagagatcttcttggcagaatatcgaaataaagagttatatctagtaccttattctgaaaaataaactcatcaaaaatggtgagtttttttaatgtttctctttcttttctcgaataaataggtaggagggaaaaatgagagtagtgagtgtgttggggttgttactcctatcttttttattttattgtggtgatgttaaggctgaaacggctgataatatttgttttgttacgtttgatgcggtgaaagaaaaaatggtggctaaagaggaatttttcctttttgttggtcgtttggataatgtggatacgcagagaggtttggagcggcttgaagctgtggaacaaacgatttattttcttgatactaaggaaattgattatgttgcttataagaaatttgccaagaaatacaatatcagaaccatgacacatttgggacattttaaagggaaatatcaatttgcggtggctaatgtctttacggtagatttgccaagttttctaggttatcaaggtattctctttcaaaatcagcaaaatctgttatactaaagctgacataaaaacacatcgcagttggtagtctgtgagtacaacatgtatcagtaaccttccccttccgaggtcgtccattgtcaatttttttaaggaggggctgttatgaaaatgacagtatattttgatggggcattttggtcggctttgattgaatttacggattcgaagaaacgttacaaggcttttcgttacgtgtttggtaaagaaccaaaggatgatgatattctaaactttattgatgtttctttgggaaaatggctgcgcaggtatgataaggtcgaagtaagctctaagttttcagcgccagctatttcacagaaaaaacgaaatccaaaacgagtgcaacgtgatatcaataaggcaaagtgtaagcctgtggtgtcaacgaaagctcagcttgctatgcaggaaatgcgtgaggaagtcaagaaagctcaaaggtctaagcaaaaggtgaagcgtgagctagaaaaggaacgacaatacctgcttaggcaagaaaagcgtcatcagaaaaagcggggacattgaaaagaaaaaagtttaagttttctgtaagaaaaaatttaggtttagttaagcaagcggctctatactataaacaatcctaataaactttctttttcataatctcctagagagccctagcttgaagaagctggggttttcttttgttatctgaaaataaaaaacaagatgagaaattctcaccttgtttttaacttaacccagatattctgcgatagcggtgtcggttgcgatgcgaccgaatgtgaaaatgtctgttagcgaatttccaccgaggcggttaccagcgtggagtccgccagctacttcgccagctgcaaagagcccattaatcgtttgcccgttttcgttaataacatgggctttggtatcaattttcaagccacccatggtgtggtgaacggctggtttgcgtggtgtcgcgtaaaatggtgctttttcgactttgaggtcgaaggcacctttatcaaattcaggatcgtgaccagcatcaacgtatgaattgtaattggtgattgtttctaccagaacggctgggtcaatattgatttgctctgctaattcttccaaagtatcagcgcggaaaagcgttccagcttctacttgagcatcaattttttcttggcttgtattataagctgtttctttgatattttcatcagcaatcaagtagaaaagtccaccgttattaattgccgcttgggacaattggtcacggctgccatattcgtcaacgaatcgttttcctttggtattgaccatgataaagttagctggtgggacttggagacctgagaagagagcaccagtaactgggtctgatacgggcatcatttggctgaatcccattccaaccaagtcagcaccaacggattgaccaagtaaaatgccgtcaccagtcgctgctggggtattagacgtggcaatgtcgtcatcaatttctgaccagtaagtattgtactgttggagcattttagtatttgctccaaagccacctgttgtcagaatgacagctttcccatttacggtaatggtttgaccattgcgccctgttcccttaacacctgtgacaataccgtctgtaacaagcaattctttgacttgtgtatctgttaaaataatgccaccattttttaaaacaaagtctttcaaaacagaaataaaggcaacacccattggaacttttggtttatgaccgcggcgccagagagctccaactggcatggtgacttcgtcacggacaaattcaacaccgatattttccagccagcggacagattcgagggcgcgctcggttaaaacgctgattaattgataatttccgtgaatttcattgcctttaaggtcttttcgtttaccgccaagataagtttggatacggtagagtaattttgaatcaaagagataagtggggtctttgaggtattcttcgatttcaacttttaaagcacggaaatcatcgataaattcagggtcgattgttgcttcgtcaatgtcatgcaattcttgaagcgtattagcttcaccagggttagcagcaaatgtattttgccaagcagggtcaggagcattcattggtccaccggcacgaacagtgtttccaccaacagatgggaatttttcaacgacaaccacttttttaccagcttgaagggcacgagctgcagcagcaagccctgcgccaccgccaccgacaacgacgagttcggtatcgtaagttctatcttttttatcaagcgctgatggtgcttttggacgtgagcggagtgcatctggattggcacctgcttgtcgaacagcacgagcaactccgtcaagaacaccatttgatgttaccgaagcacctgataccgcatcaacatttaaagtttgtccttcaataatttcatttggaatacgagtaaagacgacgtcagcaattccgcctgtttcaccagaagaatcaatgtcaatagcttcaatacgttcttctgaaagggttacggacattggcaaatctccgttgtgcccaactgtcgtgacttgataagtaccaggttcaaaacgaacttcttctggttcattgagttgattggcaatggttgcaaagcgaaggaatctgaagaaacatgattctagaaaatcaatagtcccttggtctttaaggtcaccattttcatcaaaagcagtttggacacgtcctagtaaaaattcacttcctggcatgacagtagcattaacacctggtgcatccaaaatttggcggagatgcaattgcgcacgagatgagccttgaatgtcataagaagctccaacaatcatggttggcttgccagctaaaggatgaatgttgaaagaaagccactcaagaaggctgtttaagcttgaaggaatcgtgtggttgtgttcaggtgttccgatgataacaccgtcagcttctgtgattttgctattaaattcttggataacagctgattctgtttggtcatctgtttcattgaacatgggaacatctgtgatttctaaaatctcgatgtctgcctttttggcaaaatgtcttgccatgtattgtaatagcagtcgattatatgattttttggcgttagttccgacaatagcgactaatttcataacttgtcacctcctatttggcttcccaagcaaatgctcttttgcggtctgtgtctgcttggctaacgatttgattgctaatctcaacaaatgattggaattctttgaaattatcttcaagttcggcgactttttcagggttattgagattaaaatcatcatctaaaacttgttcagaatgtccgaggaaaaattctgttcctggcatgatgcgtgcctttaattcaggagcatcaaggatttgacggagatgagcttgtgcgcgtgaagtaccgagagcaccaagagaagccccaacaatcatggttggtttattgataagaacacggctagtgtaggcaatccattcaagagcagaggcaagtggcgcaggaatcgtatggtcatattctggagttgcgataatgacaccatctgcgctagcgattttttgagaaaaatcagcgacaggagcaggagctagcttatcttctggttcattgaaagctggcaaatccttgatttcaaggatttcaatatcagctgaatcagaaaaatgcttcgccataaattttaataattttcggttggtagaacggtctgaattcgttccaacgatagcaactaatttcatatagtttacctcttttacacaaataattacctacatcatactctttttttaaataaagtgtaaacgtttttatgaacaagaatgtgatagtatcagtttttaatgttataatacaattttctgatttttttagtattttagtattgttttctgcaatgtaagcgttgacattttaaggcgattttgttattatctttgtcaaaataaggcaaatgtaatccaaaaggaggtttcttatggataaaaaaataaatcgctggctagtgttggcagcctcgactgctatcttactatgtacgggtgcagtttatgctttttcaacttttgcgcagcctttgagtgaacagacaggttggacaatgccacaaatcatgttagctttttctattaattcagctattggtccgattccgatgattttaggtggttattttgcagataagggctgggtgaagtggtcaattgcgattggtgcgattctttttgctggtggtttttatctcacgggtacggcaactagtttagcgcagttatatatttactacggtctaattgcagggctcggtcaaggttttgcttactctggcggtctgtccaataccttgcgactatttccagataagcgtggcctagcttctggaattatcacgggtggcatgggcttagcagctgtttttgcatcaccgattgctaatagcttgattttatctcatgatgctcagtacgcctttcggacaattggtctagcttatattgtcatcgttcttgtggcaagtgtctttgtccaaaaagcacctgcaggatataagcctgacggttggaatccaccgacttcgtcagcgcaaaatgtggtcaacaaaacatggattgacatgctaaagacaccagctttttatgtcatcattgcaatgttctttgtcggagctttttcaggacttatgattgcttcaaatgctcggacgattggcacgtcaatgtttgggctttcggcaacggttgccgctctttacgtatcactctattcaattgctaattcgagtggacgttttatctggggaactgtttcagataggattgggcgttcaaataccctctatattattttcaccgttattgccttagcgctagcggttctggcatttgttccaggacaagctggttttgctgttggtattattgggcttggcatttgttttggtggtgtcatgggagtttttccgtcaattgttatggaaaattatggtcccgccaatcaaggtgtaaactacggtatcgtgtttacaggatattcagtagcagcttattttgcaccaagtatcgcttcaaatatcgcagtggcaaataatggtagcttctcaattgcattctacattgctatcatattagcacttgcagggctcttgctcaatttcctatacggaaaaattagccaaaaagcttaaataaaaataaggctgagacaaaaagtgctcagcttctttggttatatagttattatttacaagacgcagtatttgagtgggttctaatacgctgataaatcagcttttacaacccttttgacatcaagctgcgcttgacttcatttccaacctcaaaaggttccccaaaccttttgagccatgcggggatgggttataaaggttcggggaacctttataatcgggaaataaaacttacgaagtaagtgtcaaaaacagttcagtaaactgttttaggtcagcaacaagaaattaagacttgctgagaaatcgaatttcttcgaaattactgattcgctttttaatttttaggctcatgaataaagtctccactggagactttatttgtctcactcccattttatttacaatcattcaagccatgggaatttctggctattgtgaatgtgttttcgttccagctgacttaaatcttgttcgcaatggtcaattgttcccaattttaaagtaagtttgtctggcgtgtcatctttgacgtggtaaatttggctgtgacaattcttgcaataatagcggtattttcctttagaggattcataagtcacaagctcatctgcaccagataagatttgaaaatcttcaacgttgaccaaagaattaaccgaaaaagccgaagaagaagcttttcggcaatacgaacagtgacaaaacacgatagttcctaacagtttttgggcttggtaagtgacagtgtgacagagacatgaaccagtaatcattttatccctccattttcagatattctttcaacattttcttttgtggggttgccatggggtaggtggaaagttggtcttgtgcgacccagcggagttccctatctttggtaaactcatttgagttgactgagccttcgatgagttcgattgtccatttttggtggctaaaggtatgcttgacgtgattgaaggtttgatttgtccaagttgggtttagttgataatcttccttaaataacgttttttgcgacgttgttttgagagtgtttttggcattatctgtctcaaataaatcaagttgttgcccaataaaatcagtttccatgattggaaatgaccagaaaccaccgagcaagcgtccgtcagtattcttttctaataggaaatcgcctttgctgttgcgaatgacaaaagcttgaatttgcaacggttttggctttttctttggcaatttgatagggtatttgtcataagtgccgtgtaaataagctgcgctgaaaaagcgaattggtgattcatctgggcgaggatttttagcagagtcaatatctgtgcccaaatccataagtgcttgattgaaatccccagggcgttcagggtcaatgagtacttccataatagcttgaaagattttgcgatttttagggccaccaatatcataattgacttcaaaaagccttgccataacacgcatgacattgccgtccacagctggctcgggaaggtcaaaagcaatgcttgcaatcgcaccagctgtataaggtccaattccttttagggagagaatatcatcataagtgctaggaaattcgccattaaaatcgtccatgatttcttgcgcagctttttgcatattgcgcacgcgtgaataataccccaagccttcccaagctttaagcaatttttcttcaggagctttggcgagatcgtcaacggttggaaaccaagctaaaaagcgtttatagtagggaataacagtaacaacttgtgtttgttgcaacatgatttcagatacccaaatgtgataaggatttttggttctgcgccaaggcaaatcccgtttttcattgtcataccaagcaagcagcgtgcgacgaaaagaagcaattttctcatcatcccacatctcaatgccataatcagtaaaattaatcatatctctattttagcaaagaatgatttctttgaataacaaaaacgcttattattttacttcaccaattcttttcataaagccttaaaaatgagatttttgactattttttagaaaaatgagtatttaggtattgacaaaagtaagcggttacactataataaaagtgtaaagaaggatgacaaaagtaacgaagtaaggaggtaacagttcttatgatgaaaccacatgtcgcccggtacaaaaatggtgattggtctcctagtcggagtgagtaggcacagttgactttacggaggtggcgcttatgttagcttttaacttaggacgctataaagatggtgattaagcatcttgtttagccttgaaaaccaaaacttgtaacaaagtacatcggaggaacgccttatgttgatatttaatgtaggtcgttacaaaaatggagactaacgacttgttgcagaaaatagtgataaaggagtgatgtcacattttaggtgagaaaatattattggaagtaagcggttagaaatggctagtgcaagaaatattaccggttgatcttgttgctagtaacagtagtaatcgaaagggcttctaatcatattgcttccatgtttgaaaaagcttttaaagaaagttgtgatagatatgaaagcaatcaatgtaggccgttacaaaaatggagactctaaacagatatggcgacgagtcaatcgctgtatcaatcaaaaaacagaaaaacaaattaaaaattaggtgattattatcgttgttatgtgagtattttcagattaatggaggtatcttatgaacgtagcaagatataaaaatggtgatactttagctagttgcagaaaatagctaagggagtgaaaccaatgtaaaaagtagtgataaaaaaagtcgtggaggtatgtacaatgctgaaaatgaatttaagtcgctataaaaatggagataataatccaacagcctaactccttatgagattggtatgttggtacaacatacgcaatatttttaaaagggtctggaacacttaggtgttccagattttttgttttttctagcttatttttaacggaaaatttgtggtaattaatagtttaagcgcttcttttcttttgccgtgcttaagatagcattaagttttaaggtggataatggttgccaagtaaatttaacagaaggagcagccattttgccaacagaagcgaaaaaaaagaagaggtacctttatgaggttgacctcatgcgctgtatttttatttttggagtgctgattaatcatgttagttctctatttaccaacgccgtatctaaaagttcaggagcttatgaatttttcacggcaactcacttgatgccccattttacacgtatggggtttatgtttgtcacgggacttgtgctatttttaggaaattataaaaaggaccatttggatattgtacctttttggattaaacgttttaaaggttcaggaattccgtacgttttttggaatggattttatattctaatcacgttattggttatgggaagttttacttttcctgaatggcttggagaatggggagatgcccttttacatgggaatcgcttttacctttactatattttggtaaccatgcaactttacttgatttttccaatcatgctttggttgtataagcgatttgtgaatcgacataaccttattatttccatttcagcgcttattcagttgctttttcttttctatatcaaatacattttcccacatcaagaccatgcgaattggccatatcttttccgttcctacggaatgtttgtcttgacttatcaattttattttatggctggtgcttatgtgtctatttattatgataaagtcacgacacttttgatgacttatcaaaagcgaatttatgcgataaccgcttgtctaagtctggggacgatagggctttattattacaatacaaagattcttgggttaagtcgtcattatgcgcatttggttcatcagccttacatgatgatttatgcgattttcatgattgcaacgatatttgcgcttagtttgcattacgctaaaaatcgtgaaaaaccaagtctccaatggttacgtcgctcggttgatttgtcgtcgaaattatcatttgggatttatctgacgcaaacagcctctcttgccatttttggcttagtgattgattggattaatccgtatttgagtgatgtagccttggctttgcttttcccattgggttatcttttggtattgggtggtgcgtggctaatttcttatttttgctacaaagtatcgccatttggcattttaattggtcgtccaaatcatataaagaaaggaaattaagatattcatgacacagttagttgatgatttaaaagcacgtttgttggaaaatgcggagcgtgaatttttaaaagatatttctcttaatcactggtttacggggcaagatgtggaagatgatattgctatttttcaagaggcttttaggcggaatggtcttggaaaagatgatgtcgtttttatggctctggaaaattcagcggtttatattccgatgaatcaggcgatgtggcgttatgggattaccgcgcatcctgtggcaagtacaacaccgattgcagaattggtagcagattatgatgagaatcagtattctgctatgattttcaatcaggaaaaagcagctgctttcaaagaaaatgctgaattgcgctacgaagtgttacatcttaaaacatttccagatttggtcttgctaagtcgtaaggacaatgataatacgcacaaagaaatggcaccgactgaagataccttgggctggattttgaatacgtctgggacgacaggaaagcctaagcaagttggactttcgcaccgttttatgcgcttggctggtgaggacgacttggtgtcgcaccgcatgacaaaagacgatactgtcttgattgtgatgcctatgtttcacatcaatgcgcaagaattgattgtcgtttcgaccttgttatcaaatggtcggattgtgattgcaccgaaatttagcgctagtcacttctggcaatggattaatgcacatcattgtacatggagttctgtggtgccaacgatcgtaacgattttgctgaaaaatcaacagtctttagataattttgaccctaatcatcaattgcgttttattcgttgtgcatcagccatgttgccaatcaatcgtaatcgtgaattttcagaaacatttggtgtgccaattcttgaaggctatggtatgacagaatcttgtagtcaatgtactctcaacccaattgatgctataaaggttggttctgttggtaaaccttatggtagtgaagtcaaaatcgttgacggtgatgacttgaccatgaaagctggcattgaaggtgagattgccattcgcggaccacacgttattacagactatttatcaccaagtccaaaatcattcagagatggctggttgttaacaggagaccttggttattatgacgaggatggttatctttggttaaatggtcgcagtaaaaatgtcatcagtcgcggcggcgaaaaaatcaatccgaccgtcattgaaaatgttatcggaaatttagattttgtcagaggaattgcggcggtgccattaccagatgatatttatggtgaaatcgttgcggcggctatcattttgcaacccgatgttgtggcaagtgctgaattaaaagaagaagtcagagaatattgtgccaaacatttggttaaacacgagtgtccgacagaaatttattttgtggaagctttcccactcaatccaaccaataaaatcatgcgtccacagctgtcacaaatgcttgccaaacaacgaaaggctgaaactgtatgaccgaactaaccaagacattaactgaaaaactatctgaaaatgctcaaaaaacgattatcaaggacattcagctagacacttggtttacagggcaggatattcttgatgacatcaagcaacttcaagatttttttcaaaggcagggaatgggttatcaagataccttgtttttggcgtttggaaattcggcgctctacgttcctctcaatcaagccctttggcaactgggaatgattgcgcatcccgtatctgaaacgacaccagctaaagaattgcaaaagtattatgaagcagctgattacccagctatcatcgtagaatctgacaagattgaggcttttgaaaaatatgcagagctgacagcgcattatcttccgctgaaaacttgcccaaatttgattattttaacgaagtcaggtcatctagccccttcaaagctgcctacggagaccagtctggcgctcattcttaacacttcaggaacgacaggaaaaccaaaacaagtcggcttaacgcatcaacaattgctaattggtgctaaaaacagcattgctagccaccctcttactgaaaatgaccgtgtgttggttgtgatgcccatgtttcacatcaatgctcagaatatcattgtcaatgcaacgcttttgtcatctggacagctaatcattgcacccaaattcagtgccagtcgtttttggacatggattcaagactatcgcatcacgtggacatctgtcgtgccaacgattgtaacgattttattgaaaaatgaaacatcacgtaataccttcaagccagtttctcatctgcgatttgttcggtgcggctcggctattttaacaaaaagtaaggaaattgcctttcaagaaacgtttggtgtccccattttagagggaatgggaatgaccgaagcaagtggtcagattaccttaaatccgccgacagcaatcaagcaagggtcagttgggaaacctttcaagattgatttggcaattgtcaaagataatcagctgactaagcaagccatgcaaactggcgaggttgcccttcgtggaccgcaggtgattactgattatttgcaaccaagtccgtcagcgtttaaagatggctggttactgactggagacattgggcatttggacgaagatggctacctttaccttgaaggacggaaaaaagattttatcaaccgaggtggcgagaaaatcagtcctgtcattgtcgaggatgtgttggcacagctcgatttcatcaaagatgttgctgtcataccagtagctgatgaggtttacggcgaggttgtggcggctgccattatcctgcaaaatgctgtcaaaccttcagcagccttggaagctgatattatggcatttgccgcagaacatctggcaaaatattgtcaaccaacacagctttattttatggctgactttccgagaaatccaactggaaaattattacgttgccagttgattgaggaagttcaccaattatcccttgagaaaggaaaatagattgaaaaataagaaaatcgcacgaaaaagttttatttttgctctgttagtctgttggattggcgtggcattttacggctggaaacaaacgcaagctgacgattcaagcaatttgcagacgattgttattggttaccaagcaggtgatgaatttgatatttcgcaagcgcgtggtgaattagttgaaaaaatggaagcgcaaggctataaagttgttttcaaagaattccaaaatggttctgctgaaatgcaagccttggcatccggtagcattgattatgctcgcatcggtgacacgccaggggtatcagcgcttgctgcaggaacagatttaacctacgttgctgttggtggtaagaaagaccaaggttctggtatcttggtgcataatgattctggaattgatagcgccgaagatttggctggaaaaacgattgcctacacgcaagggacaagttcacaataccttgtcatgaaagctctagccgcagctggcttaacaacagatgatgttaatcttgtgagccttgaccaaagcgccgcaagtgttgcctacgcggacggaactgttgacgcttgggcaaactgggacccagcaacatcacaagcagaagtaactgataattcaaaattagttgtcagcggctctgatattggtgataacaaccgttcttacattgtagctgctagtgatttcgctgaagaaaatgaagaagccacagctttgttgattgaatacaccaacgaggacatggaatgggctaatgaaaacactgatgaattggttgaccttttaacagatagcctcggtgttgaccaagctgtcgttgaaaaaatggtatctcgccgcacgtattctatgacagcaatgacatctgaatctgtttcagaactacaagatattgccgacttattttacactgaggggttaattgaaaataaagtaaccgttagtgaccatgtgcaatacgcagaggattgattagaaaggcagtcttatcatgaaaagattaacagtaaaaaaatcagatgttgttttaaatatcctaccgtggttaatcccagctttgctcattatcttttggcaaatcggtgtcatggcaggttggattaccagttcttttatcccttcaccttggagcgttttaaaacaaggcgtaagcttatttaaaaaaggaacgctacaagaaaatatcagtatcagtttataccgcgctagcgttggctttgtcatcggaggaggaatcggctttcttctcggtgtcatcaacggcgtttcacgtgtggcgcgaatgacctttgattcaaccattcaaatgttgcgaaatattccacatttggctttgattcctgtggttatcctagtgttgggaatcggtgaaacagccaaaatcagtttggttgctatcggttgcctatttccaatgtacatcaacacttaccacggaattacgtctgttgattcgcacttggtagaaatgggaaaatcctacggattatcacgtctgcaaatgttccgtaaaattattttccctggtgccatgccaacgattctaatgggtgtccgctatgctttgggtgtcatgtggacaacgttgattgttgccgaaacagtatcagcagattctgggattggttacatgtcaaccaacgcccaacaatttatgaacatgaaaacgattttcctatgcattctcatctatgccttgctagggaaattgtcagatttcattgctaaaaatctggaagatattttactagactggcgcaattaggaggaaactatgacagatttgattaccattgataatgtcacaaagaaatacggtgataaaacagcgctagcaaatgctaatttagctattggaaaaggtgactttgtagcccttgtcggcatgagcggtagcggaaagactaccttactacgaatggttgcagggctcgaacaaccaagccaaggaaccatcagccaaaatggtgttctgataaggtctttgaatgagaaagcgcgtgtcatgtttcaagatgaccgcttattgccatggatgactgtgcgagaaaatctttcatttggaaataagtcagataaaatgacaaaagaagctgacgagcttttaaagcttgttggtttgtcggattttgcggattattacccagctcatttgtcaggagggcaaaaacagcgtgtggctttggcgcgtgcgcttatgtatcaccctgaattgttgctgcttgatgaaccattaggggctcttgatgctttaacacgtcgaaaaatgcaggacttgattcttgatatttgtcaatcacgcgattttacgacgatgcttgtcacgcatgatattgacgaagctgcacgtatggcaaataaaatcgttgtcgtcaaacattcgactattgttgatattgtcgataatccttatcgcaaagacgatagctatgaaggaaaagctaaacgagcagaaattgttgacaacattttagccacgatttatgctgaataaacagaagaacttgagaaaattttctcaggttttttgtttggaattgaaattaatagatgtttggtatcacttataaaattgtctatacaactatagaacatattgttggacattgtgcaaaggtttacatataatgtaggggattgagagtgtttaattattttagacatttttaatcaactatagtgaataaaataataggaggactagcacatgtcacttattggaaaacctatcgttgaattttcagcagatgcttatcataatggagaatttatcaaggtatcaaatgatgatttacagggaaaatgggcgattttttgtttctatcccgctgatttctcatttgtttgtccaacggaacttggtgatttacaagaacaatatgcagagcttcaaaaacttggtgttgaagtgtattccgtttcaacagatacgcatttcgttcataaagcttggcacgatgattctgatgttgtcggaacaatcacttacgctatgattggtgatccagctcatgttttatcagaaggctttgatgttcttggtgaagatggtttggcacagcgtggcacatttatcgtggatcctgatggtattgttcaagccgttgaaattaatgccgatggcattggacgtgatgcaagtactcttttagataaagtgcgtgctgcacaatatatccgaaaacatccaggagaagtttgtcctgcaaaatggaaagaaggagaagacacattaaaaccaagtttggatttagtaggtaaaatctaaggaggttttatatggcattagatgcagaaatcaaaacacaattgtcgcaatatcttgcattaattgaatctgatattgtttttcaggctaatcttggaacagatgaaaattctaaaaaagtcagagatttcattgatgaaatcgtctcaatgagtgataagattggttttgaagagaagaagcttagtcgtacgcctgcttttcgaattgctaaaaaaggaaaagaatctggtgttgaatttgccggcttaccactgggacatgagttgacttcattgattttggcacttttacaggtttctggacgaccaccaaaaatagatgaggaagtcatcaaccgaattaaagctattgatactcctcttcattttgaaacttatgtcagtcttagttgtcataattgtccggatgttgtacaagctttcaatattatggctgtgattaatccgaatattagccataccatgattgagggaggtatgttccaagatgaggtcaaggctaaggggattatgtccgttccaaccgtttttcacaatgatgaaatactgacttcaggacgtaccaacattgaacaattacttgatttgattgcaggaccagtatcagaaacgacatttgcagataagggaatttttgatgtcttggttattggtggcggaccggctggaaatagcgcagctatttatgctgcacgaaaaggaatcaaaacaggcttattagccgaaacgtttggtggacaagtgatggaaaccgtcggaattgaaaatatgattggaacaccttatatagagggaccagcgcttatgtcccaagtagaagagcacaccaaatcatacgatgtcgatatcatgaaagctcaaaaagcgatagctattcataaaaaggatgttatcgaagttacgctagctaacggtgctattctaaaatctaaaacagccattctatctcttggtgccaaatggcgtaatattaatgttccgggagaagttgaatttagaaataaaggagtcacttactgtcctcactgtgatggaccactctttacagataaaaaagtagctgtcattggtggtggtaattcagggcttgaagctgccattgatttagcaggacttgctagccatgtctatattcttgaatttttaccagaattaaaagctgataaagtcttacaagatcgtgcagaagcacatgataatattactattttgaaaaatgttgccacaaaagaaattttgggtgatgagcaggttacgggactaatttatacggatagagaaactggcgaggacaaaacacttgacttagagggagtctttgttcaaattggtctcgttccaaataccgactggctaaaagattctggcattgaccttaataatcgtggtgaaattattgtggataatcaagggagtacaactgttgcaggtatttttgcagctggcgactgtacggatcaagcatacaagcaaattattatttctatgggaagcggagccactgcagccttaggtgcatttgactaccttatcagaatgaatgattaattttcaggttgaagaaaaatcctattttggataattttcttcaatcttttttattttctaatcaaaaaatataaaatttggcaatatttctgttgtaaggattataagaattttgttattgctaactaatgtctactagttttaaaggtttttattttatcatagtttaatgttataaaagattaataatgtcgctacaagacgaaaagaaaattttgcttgaaaacagttaactcaaatgttataattggttaactgttttttaggaggttttctatgatttcaaaaagagactgtttaaatattttacaaagtgacggaaattggtgggaatattatgcgcaagctattttagtgaaaaaaaatagatcagggaatcgtattagactaaatactctactgaatgccaaaagtggtttgtgcgctgaggattgtggctattgctctcaggctaaaggtagtaagtcaaatattgagcgttatggattattacctaaaaatcaaattattagacaagctattattgccaaacgaaataattccagcgttttttgtattgcattaagtggtacaagaccaacagataaggaaatttctatattatgtgatgttatatcggaaataaagcgtattatgactattgaaatttgtctatctattggtttagttcgtgatgaccaactagtaaaattaaaagcagctggtgttgatagaattaatcataatttgaatacgccacgagataattatcctaaaattacgacgacacatacttatcaagatcgtttagatacgctagaagttttaagaagaaataatatcaatacttgttcgggatttatttgtggaatgggagaaacggatgaacagttaatagagttggcttttgatttgaaaagtcaagaaccttactcggttccagtaaatttcttgttgcctattaaaggaacgaaattagaaggaagaaatgaattaactcctatgaggtgtttaaagattctagtgatgttgcgtttgctttttccggataccgaattgcgtattagcgctggtcgtgaatatcacttaggggagatgcagcaattagcaatattaattgtggattctatttttctgggaaattatttgacagaaaaaggagcaaaaatttctgaagatcaaaaactaattcagggtttaggattaacagtagaaggtgaatgtaatggataatcaatttataatttgcggaatagatactgattgtgggaaatccacagcatcagtattactacatcaatatttcaaagaaaagttgaataagaattctatcatcattaaacctcttcaaactggtaaaactttagatactgatttttatacttcttgcgggattccacaggaaaatattattaattttgaaacctatagatcagaaacttcacttcatctagctgcattgcttgagcaaaaaaatattcaattagaacacattgttcaacagattataaaacaagtagaatctcatagtttatcacctgttattatagaaatggcaggtgggataatgtctccaattaatcaaaaacaatcaatgttagacattgttaaagctgttaatcttcctgttattttagtagtatcttcataccttgggtcactgaatcatactttactaacattaaaagttttacaatctgaagggattgatatttttggaataatatttaatcaagtgaggacggtagaagggataatcacagatagcaatgaatatataaaaaatttaactgagttgccgatattaggatacataccatatttgaatgattataaacaaagaatgaagtcagaaaatgacaagaatagactcataaaaaattggagagtgtgatgaaaacaaaaaaagttgttttgatgtcaattatgcttgctttactaataattagttcaaagctaattattccattgccgttgttagattttatttcaatacagataattattgtgtatatgttatatcctattttaggaaaataccatagtttcttaactctttttatttatcttttgttaggaatattcggcttacctgtttttgcatcgggtggtggtatattatatattttgagaccaagttttggatatttacttgcttttttgatattaccatttattcaagatgaggtagagaaactattaggaaagaaagtagtaacctttactaatatgtttatacagaatttgatatgtttgctatttatttacttattcggcttaacatacaaaacagttatccttttagtattttatggaaaatttgaagtctttcatgatatactattttttagttcacttgttgattttttagtagattcaggtctaactgttattataactttaatgatgataaaactaagaaactatcatcttaataattgactcttttagtttaagacgactttcaatatagtcattctagagtaagaagatgtatttgatagaaaatattagtttagcaggaaattaactgattttcgtgttataatactcaaaaaaatatgttaaaacaatttgaatattatattaaaaattcaagacaagacaaaattttgttacaatttatgctataatgtatctcaaactagcgaaaagcgaggtagggatatgtgggttgttcggaaaatgtattggcgtagtggtcaacaatatgtacaagcacagaaaatgtttgaaacccgcgaagaagcggataattttagaaaaggcttagagtttgcaacggagctttatgaaacgaatctccctgtctctaataaaggtgaattttaatttaatatttatatagaaagcacgcctgtgcttttttattgtcttgtttaatagtagataatatcattttaacaatgcccacaatggacaaatgaaatctttctgtaatacataaatctcttgcgtattcgctctacatatagtataataacttattgtgagtatccctcacttactcgtgacgcgggtcacgggtcattagaccaaaaggaggaaaaatatcaatggctaaatacgaaattctttatatcattcgtccaaacattgaagaagaagctaaaaacgctttggtagcacgctttgactctatcttgacagacaacggtgcaactgttgttgaatcaaaagattgggaaaaacgtcgtcttgcatacgaaatccaagatttccgtgaaggactttaccacgttatcaacgttgaaacagaagatgcaacagctcttaacgagtttgatcgtctttcaaaaatcaacggtgacattcttcgtcacatgatcgttaaacttgacgcgtaagaaggtgctttatgattaataatgtagtacttgtcggtcgtatgactcgcgatgcagaactccgttacacaccatctaatcaagctgttgccacatttacacttgctgtaaatcgcaactttaaaaatcaaaatggtgaacgtgaagctgattttattaactgtgtgatttggcgccaacaggcagaaaatctgtctaactgggctaaaaaaggcacattgattggtgttacaggtcgtatccagactcgtaattatgaaaatcaacaaggtcaacgtgtttacgtaacagagattgttgcagataatttccaaatcttggaaagccgtgctacacgtgaaggtcaatcaggtggttcatataacggtggattcaacaataacaattcatcatttggtggctcatcaaacgatggtggtttctcatcgcaatcttcacaatcacaaacacctaactttggtcgtgatgaaagcccatttggtaattcaaatccaatggacatttcagatgacgatcttccattctaatggatatggacaactcaagtgaaaaacttgaaacaacaataatataaaggagaataaaacatggctcaacaacgtcgtggcggattcaaacgccgtaaaaaagttgattacatcgcagctaacaaaattgaatatgttgattacaaagatactgagcttcttagccgtttcgtttcagaacgtggtaaaattcttccacgtcgcgtaactggaacttcagctaaaaaccaacgtaaagtaacaacagctatcaaacgcgctcgcgttatggctcttatgccattcgtaaacgaagactaattcgttactttaaataagaaaaaatgactccgcaaggggtctttttgtgtatacaaatactttacagagcaaaattattgttttataataattttgaaaaggtaattattgtaaaacaataattgaggtgtgaaatgaaacggattgtttttaaggttagtagggaagttgtcaaaatcatacgctatttagcaattattggaattattgtcatgtttttaggcattctaggtgctgttcttgacggctggagtcaaaatggaatgttgacactagattatggctctcaaattgctcaagtgccgatttggtttccgatgcttattttgctattagcggctgctattttttatatggtcgttatgattatgcgagcgttagacaaactgttgatgaattttcagaaagactcttatttcaattctgaaaatatcacttatctttctaaaatattgcgttgcttgctgattgcgacaggtattcagttggctgttaaccttatttttaattttttgaatcttgaacatgttagtgatttatttgagctatcattgaaagattattggttcaacattgtattacttgttgtcaattatattggtatccttgtgataaaacacggcattcaacttcaaaaagatcacgatgagattatttagctatggaagaaatacaagtacatttagataaaatgctcaagttgagaaatataacctccaaagaattggctgaaaaaattgggataactgaggcgaatttatcgattttaaagactggaaaggcaaaaggtgttaggtttaatacgttgatgaatatttgccgcgaattagactgtcaaccaggagatattttaaaatataggagagactaagatgaaaaagagaaaatttttgctaggactgtcagtgctgtttctaactattttggcaggatgtggtgctgattcagaattaactgatgtgtcgcaaggcattcaaacggagattaacaaagattattcagcagaattgtcagaaatgaaaattatggatattatttcagttgagagcgatgaggaacaacaattatcagcacagttttcgggtactctttatatcatggctaccaaagaggacttgcagaagttatcttctgatgtcgattttgctttaaatgacgttccatttacggctgttaaagaaaatagtgacgatgattttaaccttaggtataacaataagacgtatttttcggttaagaaaattgatgtgacagatattgataaggtgaaaattacatcagattggtcaaagaaaattatcgtggcattgcgtaatgcctaaaaaagtcccgctaggttacctagcaggacttttaatgtttgaaaattattgttgtggtgtcatggcattaaggatattatatttcttttgaaggaaataacgtccaagaagtgcagcagcaccaatgattaacataacgacagctggtaattgtgggttgataactgctggcaagaatgctgttgcagtgtaaaggagaacccaaccaagcattgccaaaacaagtaccaagatagttttagcccaacctggacgttcgctttttggtttaccagaatggcgatagatgaagtgataagtggcatacatagcagcaccaccaccaaaaccaagggcaagcaatgaaagcaagccagaacttgttgtcgttgaattgaagaaaccaatgacagcattaagaagggcaacaacaccaatgaaaagaagtgatgtatcaagccacattaaccaaggattgtcatttttgtcagtttgctcagctttcttgtctgaagctttttcagtaaatgaagcagcccaaacggtaggtgcgccgaaaagagcgcgcgcagtcaaaccttttttctgattttcaacaattgttggtaaaacttcttctaaaatcgctttgatttcatcatcagatttgccatcttgaatcaattgattagtagcaatgtgaataaattcttgattctttttagtaagattagttaaatccataatatatagtctcctgtttttgtgaaatagaagtgttgctaagaacatccagtaaagcccatgattaagatgaattactagtgagagaaaataaaatagttacttcctctaattaataaccaccataaatacgctgccgataaaatatcaaactttcgttactcaacatagcccaacatatcaaatatcataacgcaaaaacattggcttgataataatcatttttcgaactagtaagctgcctaggaagaaaccaatagcttcttccgtaattctgttagcgaccttagtcgcaacaatgattggaaagattacgacgagagaagtttggctcgataataaccaaacttcaagctagtaagtgattcagctgtctgtattaaagttacgacatgagagatttgattcgataataatcaaatctcgaattagtgagtggtttaggttgtctccgcaaagttacgacgagagaaaagtgattcgataataatcacttttcgaactagtaagagagttagggaagtcatataagacttccaatttataccttcaacgttgacaaatgttacgacatgagagaattgattcgataataatcaattctcgaattagtgagtggtttaggttgtctccgcaaagttacgacgagagaaaagtgattcgatattaatcacttttcgagctagtaagagagttagggaagtcatatatgactccccgtcgttttaagagtagctttagctaccttaaaacgtactctgttaaaaccatttctttctaaagaaatagataacaacgaaggcgctcatagcagcggcgataaagacaatgtaccaaaaggcgtgtggcagaccatttagtggtaaccagttattttgaaagttcatgccataagctgagaagataacggttggaatatccaaagccatggtcatcaatgccaaggttttcatgattgtattctgattgttgttgatgattgaagcagtcgtctctgtcatggcgttcaagacattttcataaatgccagccatctcaatcgcctgttgcgtttcaatcagagtatcttcaagcaaatcttcatcttcgatatattttttcaaagaactggtactactcgaaagttttttaacgatacgttcgttgaatttcaatgaggctttcaaatagacaatagatttttccaactccatcatgtcaattaattgctcattacgtgtggcgttttccaattcagcttcgattcggtcgctttgacggtcgatagaacgaagggctgttaggaatagttctgcattacgataaagcaattggaatacaaaacgtgttttcatgaatgtgtaaaagtttttcacacgacgattgaaaaaattatcaaaaagcgtcaattcctgcaaacacgttgtgataacagcgttatctgtcacgataataccgagcggaatagtgacatagtaacttttgttattacgttcttcgtaggttggcacatcgacgataatcaatgtataatcatcttcaacggcaatacgtgatgtttcttcaaggtcgagtggcgcacgaaggtctgtaatatcaatattgaattgctcagataatttgacagattcttcctgggaggggttgaccaaattaatccaagcgccgggctcgaatgtattgatttctttaaattctaacgctgttgatagaaacatttgttccataaaaacaacccctccttttactctaagatacaaaatctagttagtttagcgtataacattggattttgttcaattcatttttgctgtatgtcatattaaaatccttagcttgatattttcaagaggagaaaattttacatactaatctattatactacaattagcagttttttgggacaaagaatagtagaaaatttgttataataaggtaagaatcttagaagtagctatgaagaaaggactaggacattggtaaaaagtgaacctatcggatgaaggatcatcaagataggttattcattttgctgatgaatagattatgcaagataaattaattattcgtggggcacgtgcccacaatttaaaaaatgtcaatgttgaaattccgcgggataagttggttgttgtgactggtttgtctggttcgggaaagtcaagtttggcatttgatacgatttacgcagaagggcaacgtcgttatgtagaaagtttgtcagcttatgcgcgtatgtttcttggtaatatggaaaaaccggatgttgattcgattgagggtctcagccctgctatttccattgaccaaaaaacaaccagtaaaaatcctcgttctacggtagggacaacgacagaaatcaatgattatctgcgtcttttgtatgctcgcgtggggacgccgtattgtatcaatgggcatggtgccattacggcatcatctgttgagcaaattgttgaccaagttttggaattgccagaacggacgcgaatgcagattttagcgccagttgtgcgtcgtaaaaagggacaacacaagacgatttttgaccgtattcaaaaagatggttatgtgcgtgtgcgcgtggatggcgagattttcgatatttcagaagttcctgagttatctaagagcaaaatgcacaatatcgaaatcgttgttgaccgtttgattaataaagacggtgtccgttcgcgcttgtttgattcggtggaagctgcgcttcgattggctgatggttatgtgattattgatactatggatggtaatgaattgctcttttcagagcattattcatgtcctgtttgtggttttaccgttcccgaattggaaccacgtcttttttcatttaacgcaccgtttggttcatgcccaacctgtgatggcttgggaagcaaattggaagtcgatttggatttggtgattcctgaccgtagtaaaacgcttcgtgaaggggctttagcaccgtggaatccaatctcatctaactattacccagccatgctagaacaagccatgacttcttttggtattgatatggatacaccatttgaaaatttgacagaagaagaacaaaacttggtcttgtatggctcaggtgagcgtgaattccatttccactatatcaatgactttggtggtgaacgtaatatcgaccttccgtttgagggagtcgtcaataatattgaccgccgttatcatgaaacaaatagtgactttacacgtaatgttatgcgtggttacatgaatgaattgccatgtgcaacttgtcatggttatcgtttaaataatcaagcactttgtgttcgtgttggtggcgaaaatggcttaaatattgggcaagtgtctgatttgtcagttgctgaccacttggaacttttaactcacctcgaactctctgaaaatgaaaagacgattgcaacgccgattgttaaggaaattaaagaccgtctgaccttcttaaataatgttggcttgaattatttgaccttgtcgcgttctgcggggactttatctggtggtgaaagtcagcgtattcgcttggcaacgcaaattggttcaaacctatcaggtgtcctttatattttggatgaaccttcgattgggcttcatcaacgtgacaatgaccgtttgatttccagcttgaaaaaaatgcgtgatttgggcaacaccttgattgtcgttgaacacgatgaagataccatgcgccaagctgattggctcattgatgtcggaccaggtgcaggtgattttggtgggcaaattgttgcctccggaacgccagaagatgttgccaaaaataaaaaatcaattacagggcagtatttgtctggagcaaaagagattcctgtgccactagaacgtcgtaaaggaaatgggcgcgtgcttcgtgtcaaaggtgcttctgaaaataacctgcaaaatattgatgtgactttcccacttggtaaattcattgcggtgacaggtgtttcgggttctggaaaatcaaccttggttaacagtattttgaaaaaagctgttgctcaaaaattaaatcgcaattctgccaaacctgggaaacacaaggcacttgaaggcattgaaaacattgaacgcttgattgacatagaccaaagcccaatcggccgtactccgcgttcaaatcctgcaacttacacaggtgtttttgatgatattcgtgacctttttgctaagaccaatgaagctaagattcgtggttacaaaaaaggacgtttctcatttaacgtcaaaggtggacgttgcgaggcttgctctggtgacggaattatcaagattgaaatgcacttcttaccagatgtttacgtaccttgcgaggtttgtcatggtacacgttataacagtgaaacgcttgaagttcattacaaagacaaaaatatcgccgaaattcttgatatgacagtcaatgatgcggttgaattctttgcaccaatccctaaaatcgcacgcaaattgcaaactatcaaagacgttggacttggttatgttactcttggacaaccagccacaacgctgtctggtggtgaagcacagcgtatgaaattggcgagtgaacttcacaaacgctcaactggtaagagcctttatatccttgatgaaccaacgacaggacttcacacagatgacattgctcgtctgcttaaagtccttcaacgcttcgtggatgatggaaacaccgtgcttgtcattgaacacaatcttgatgtaattaagacagctgaccacattatcgaccttggaccagaaggcggtgtcggtggtggacaaatcgttgccacaggcacaccagaagaggtcgccaaagtcaaagaatccttcacaggacaatatttaaaagataaattgaaataaaaagatacccagataacgaaagttatctgggattttttgttaaattagatttagagcaagtttaattagtaaaaagtaaatttattaataaaaatattgaataatctcacttaaaatacttgacaaaacgcttgttatactaactataacaaggcttgacttaggcgccaagcctttctaattgtgattaatatggaaataaaaatattggcaaaattattaaaaatatcatctgcatagtgtattgaataggagcaattatgaatcaagaagattatgaaaaacaacaggaaatggagaaattgcttgaaaatgatcgtaatcagaggattaatcaagttgagcaactccagaatcaaaatattttggaacaagaacgtttaaataacgaaaaattacgttatcaagaagagttacttcgcgaacagaacacacttcagtttgagaaagaaatggatgaccgtatttttcaactgcgtatgactttagcgcaaacttcagatactcttagccgcaatgatcttcaagctctcttaaacgaagaagaagctaaacgtgattgctattatgccgaaaaggaagcacgtagaaaagctgctgagctagctgagcaagaaaaggtggttaaagaacaagagttagctaagaaaccagataaaggtaagggaaaaaagtctaataagaagaaaaagagtaataccaataccctagcgacgatagttctaggaatattgacattagtagctgttattattttagtaacggtttacaaaagttataaacaaaaatatgctaccgaatcaacatcatctaccagtacgactaccgttcacaaaagttcggtaacttcaacaactagtgataccaaaaaacaatcgagtactagaagtaagcaagctagttcttctcagaaagtatcatctaagtcatctagtaaaataaaaaattctgtttcagcaagttcttcgaaaaaagtaacgtcatcgtcatcgattggaagtcgtgtctccaaagattcatcagaatttaagataaaagattatacagggcaagattataaaatagctgttaaagatttagtcaataattacagtatttcagaatcgcaaattaaaattgaagagatttcaacatcagattataaagaaggtttgattatcagtcaatcaccaagccaaggtgaaaccttcaaggtaagtggcgatgataagattacctttaaagtagccgcagaaagcacagtaacaatgccaaatctgacaggctatacttattcagaagctattgctgccttgacggctctaggtgtgtcaagttcacatattacggtttatcaagccgacccaaattcttctacgggttatgtgcaagtaagctcaccatcttcaacagcaactgtcactgctcaaacaccttactatggtggaacgttaagtggtaacgtggtactttacctagcagctgatgaagaacaagaagaaaactagtgtaagggttgctcagttgatgaaatgaatttagaaaagaaattcatggtttaaagtcaccaaattgtgacaataaaatggaattagtgactgataaacctaaaaacaacgtgtcattattcgatatacaggagagaacagtatgcttaatgtttttatgtttttatttatgtggttatgtgaacagggacttataggactatattttatcttggggacgggctcgttaccaacatttggttacattgaaccaatttatattgtactatacattctggcgacctctgcgatgacagcattgtatattttgccagcacttatttgtaaaacgagtgtgaagattattatctttattttatgtttctttactagttttacaggactaggttggatattactcatggtttgggcagtatcgtctaataacagtcaacgtcggcgtgaacatgaggaagaattacttgatattttaagagatcgctattaaattattcactttcgataataaaaaatacactccgaaagctggttgaaatctggttttcggggtgtttttcatcaactttttttcaccacttaagcttttttggaaaaagtcggtagaatacgattgtgttggtgtttttttggtataataaatttaaaatacctactaaggagagttgtatgctagcgagagttgagagatttgagactaagttgaatcaatcagaggttgatgcgtttttggtgactggtcaaaataatatttattatttgacagggttctggggaacgtcagcgactgtttttatttctaaaagtcgtcggttgtttgtgacggatgctcgttataccttgattgctaaacagtctgttcaaggatttgacatcattgaaagtagagatgctctccaagaaattgttaaggtgattcaggcggataatctaaagaaaattggttttgatagccaagtatcttttgcttattatcagactttgcagggtgtgtttgcaggttatgatttggtagctatgacgaattttatggaagaattgcgcatgattaaagatgcttctgaaattgcgacgattcgtaaggcttgttcgatttctgaccgcgcatttacggatgtgcttgattttatcaaagctggtcagacgactgaactgcaagtggctaattttcttgattttcgtatgcgagaatatggcgcctctggtgtgtcttttgaaaccattgtagcttctggttaccgctctgccatgcctcacggcgtagccagtgagaaagtcatccaatctggtgaaactttgacgcttgattttggttgctactacgaccattacgtcagcgatatgacacgtaccattcatatcggtgagacgactgatgaagagcgtgaaatttatgacgtggttttacgtgctaatcaagcggtgattgattcggtcaaagcaggaatgacacgccgtgattacgataaattggcgcgtgatgtgattgcaaaagcgggatatgctgagcaattcacgcacggtattggacacggcattgggcttgatattcatgaaattccgttctttggcaactcagatgagttggttgaagttggtatgacgattacggatgaaccaggaatttaccttgataacaaatacggtgtccgtatcgaagatgatttggttgtgacagaaaatggctgcgaagtcttaaccttagcaccaaaagaattgattgtgttgtagagttagataaggaggaaaacgatgactgatagactttcttggcaagattattttatggcaaatgcggagctgatttccaagcgttcgacttgtgatcgtgcttttgttggtgctgttttggtgaaagataatcgcattatcgcaactggttacaacggtggtgtgtcagaaactgacaattgtaatgaagttgggcataaaatggaagacggacattgtatccgcaccgttcatgctgaaatgaatgcactcattcagtgcgctaaggaaggcatttcaaccaaaggtacagaaatttacgtcacacattttccatgtatcaactgtaccaaggcgctgcttcaagcgggaattaaaaaaattacttataagactgcttatcgcatgcatccatttgctatcgaattaatggaacaaaaaggcgttgaatatgttcaacatgacgttccagaagttaaattgggaatggatgaatcggaagattaatgaagtttagggaaaatgatttatgaaaaataagggaatcattcttgcaatattagggattctagttttattctttagtctctctcaaccagtttatgcaggggttggcaatactgaaagtggtggtagtgtcacgactggcggtgacggaggttctggctcttttgatggttcttcaggcggattttcgagtggtttctccagtggttcaagttcaagcagtagcacgtcaacatctagtggagacggtgatttattcggtgcactatttttgcttgtcatgctctacgcgtttaagaaaacaggcaatgatgggaaagtagagcctgaaaatgacgaaaaagccattgaagctatcaaattggttcatccagattttgacgaatacgattttatttcatacacgaaagaattatatttagaattgcaaaatgcgtggatggacaaagattgggaacgcgttcggcatttagaaacagagagccttttccgtcagcataatatgcagttgcaagagtacattgataatcacacaaccaatcatttggatagagtttgtgttgaccgagctatcatcaaatcgtttaagatgtcagatgaccatgatgtggttaaagtgattttgtcatcgtacatgtgtgattacatcagaaacgatgacacgggcgaattaattcaaggtgacccaacagaacacctctatactgtttacaatatggaattcatttataaagaagatgatgtttctgattcaaatccttaccaacattggaaattaaacacctatgaagtagtggacgaagatgaattttatttgaaaaaaacgaaattttttagcaaaggataactaaaagcgcactcatctgggtgcgctttaaaatacaaaaaataaatttttcatcttaatttatcatttaaaattttttcatcaacttctgaagcaggcatccaaccttttgctagcaaatcattgatataacaattattatataagatggcaaaggcaatgttaagaccaagactgacgttagcatcaatattgagaatcgtcgttaacatcaaacctgcaatgattgagccaatcataattcccagccatttccaatccttgcgaaacagtggcacaaagaagaaaaagaaaagtgttgtccagctaaagccaactttgacttccttaatttgaccgcttgtattttcaagtcttgctgtcatccataaatctcccttaaaataaatagttgataattcattttagcagaattaattttctttaacaagaaagatgtagtaatgccttttcaaagattaaaaacatttgagccatagcgtattttatggtagaatgaagtgataaataatttataagaggtaattaataaatgattgaagcaagtaagcttagagcaggtatgactttcgtaacatctgatggaaaactcatcaaagttctcgaagcaagtcaccacaaaccaggtaaaggtaacactgttatgcgtatgaaacttcgtgatgtacgtactggttcaacttttgacactacttatcgtccagaagaaaaatttgaacaagcaatcatcgaaacacgtgctgcacaatacctttacaaaatggatgacacagcatacttcatggatactgaaagctacgaacaatatgaaattccagttgttaacgtagaacaagaattgctttacatccttgaaaactctgaagttaaaatccaattctacggtacagaagttatcggtgtgactgttcctacaacagttgaattgacagttactgacactcaaccatcaatcaaaggggctactgttactggttcaggtaaacctgcaactcttgaaacaggtcttgttgtcaacgtaccagacttcatcgaaatcggtcaaaaattggtgattaatacgcaagaaggtacttacgtatcacgtgcctaagcttgctagtagagcgggtagagagggcacgctctctttgcttttatccttatattttaattagaaaggaatgcttatgacaactgaaaatatcggtgatattgttatttcaccacgagtactagaagttatcacaggtattgctgcaacaaaagtcgatggcgttcattcacttcgtaataaagctatgacagacagtttcagcaaaacagttttaggtaaaggtgtttaccttcaaacagaagaagacggtacagttaatgcagatatttacgtttatcttcaatacggtgttaatgttcctgctgtctcaatcgcaatccaacaagccgttaaagcagctgtttacgatatggcagaagtaacgatttcatctgttaatattcacgttgaaggtatcgttcctgaaaaaacaccaaaaccggatttgaaagcattgtttgatgaggatttcttggatgactaataattttacaaattcgagacgagaccttcgtgaacgtgctttccaagcgctctttagcctagaatttggtggagaatatttagcagccgcacaatttgcttacacttatgacaagacaatcgaggaagacgatacaattgatgttcctgtctttcttttaaatcttgttaaaggcgtacaagatttccaatctgaaatcgaccaacaaattgaaacacatttgaagtcaggatggtcattagaacgtttgacactaactgacagaaccttgcttcgcttggggctttacgaaatcaaatatttcgaagaaactccaggacgtgtagcggtaaatgaaatcatcgaaattgctaaaaagtattcagatgacacttcagcaaaatttgtcaatggcttgttgagccaatttgtcgtagaataataaaaagagtgaaagttataagctttcgctctttttaagtagcaacagtcggttatctaaatagaaaaacaccaactatttttgtgatagttggtgttttttttatttaaatacttccgccaggtagaagtgatattggtaaaatgtaatctttgcttgtcttttcgcctttgattttctttaacagaacatccacgattaggcttgcaatttcatcaatcggttgtcgaatagttgtcaattgtgggaagaaattctcaataaatgatgtcccatcataaccgataatcttcaaatcttcaggaatatttaactcaagctggtgcgcgattttcatcgtaagaatagctgtcaagtcatctgaaacaaagatgccatcaggtttattgcttgcaatgattgacttgatttccatttcacggcgaatcgtcgataagttattaggaactttgaaaatcttgccgtctggaatttggaaagaaaaaccaagtgcacgtaagcccgtcggcgaatcggtgttgtcattccctgtaatcatgatgatgttttcacagccatttttctggagtgttctagctgctaattttccaccttcgaagttatcagaagaaataattgggacattaggagctaaatttctatcaaaagcgataatgggtgcgccaacgcgttcataatcgtcaataccgaggttatggctagaagagatgataccgtcaacttggttagcttcgagcatttcaaggtattcacgttccttggcagggtcgttttgactgttgcaaatgatagttttataaccatgcttgaacaattcaatttcaagatattcgataagttcagaatagaagatattgctaatatttggaaaaataagtccgataagctgagcagattttccttgaagtccacgagccagattgttaggtttataacctagcgttttcatagcctcttggactttttgttttgtcttttctgacaaatagcctttattattaataacgcgtgaaacggttgttgggctaacaccagctaattcagcgacatctgttagttttgctaccatattagtattttaattcaaagtatgttccagttggctcacctgatttgatttgaataccattttgtccgtcttcagggaacacacggctggtaaatactttttctcctttattaataaagatttcaatgatcgaattatctacaaaaatattggcacttgtttctttagggtcaatcgaacattcgcgagttgtgccaaattccgtagcgtattgaacaccggctttactgcggtcaaggataattttaccgtctttagtatcgacagtcaagctgagtccgttgcctttgtcgtcagcgaaaagaagaatttcagatttttggttagctgggaattgtaattcaagctcgtaagtattgtttgtttcagcttttgctgcaaaattttcagattcagcacgaagtgacgtgatagcttcaactgggtattgatagagttttccagctttgatagaaagttctttgacaagactcattgcgccttgataatcgtatttatccgttgggtagtcaacgtcagggagtccaatccaactgacaatcaaagtacgtccgtcaggagcgttgaatccttgagtagcataggcttcaaacccataatcaaggttttgaatttctgaagctccaaccaattttgcatttgctgtgtcaaacgcttgacatactttataagtatttgggtaaatgttgtcgtaattaagctctgatttatcaagaccttgtgggcagtaaagtagcacaggtttttcatctacaaaaacaaggtttggacactcaatcatgtactctgaaccggtaccgccaaagtcaagattgccaacttcttcccagttttcaacattgttatcaacagctttataaagcttaacgaagcctgatttatcaagactttgagcaccgacgattgcgtagaattgacctttgtaattaaaaatttgtgggtcacggaagtgttcagtaacatcgctaggttggtgaataagaacatcttcacattttgtaatgttataatctttatccatccaagccccaatttgaagcgggtcacgtacccagttttcatcacgaacatttcctgtatagaataagaaaagtttgccatcaatttcataggcagaaccagaataagccccgtggctatcgtgttttgtatcaggacgaagctcagccccagtttcatggaaatgaaccaagtcatctgattcggtatgaacccattctttcaaaccatgagcagctccaaatggccagttttgatagaagagtgtgtattttccattaaaaaaagaaaaaccattagggtcgttcaacaacccagttttgggctcaatatgatagctggcatgccaaggggattgtttgacattgtcgttgatttttgcaatctcgtctgtgctccaatcagtataagcacggtatcgcacttcttgaggtaaattcatatttttctccttttgttaatctatctacaactaatatagtaaacgttttctgcctaaaaatcaattattttccgcaaaaaagaaaaaaatatgataaacgcttgacatatttctaaaatgtgttagaatgtaaatgtagtcaagtgaaacgctttcacaaaaagattcactaaagaaaattataaaaggagttactgtaatggattatggtaaggtagcttccgacgttgtaaaagcagtcggaaaagacaatcttgttgcagctgcgcattgtgcgacacgacttcgtctcgtactaaaggatgatacaaaagttgatcaaaaagcattggatgaaaatccagatgtgaaaggtacatttaaaattgatggccaatatcaagttattatcggtgctggtgatgttaactttgtttatgatgaacttattaaagagactggtctttcagaagtttcgacggatgatttaaaacaaattgctagcagtggtaaaaaattcaatccaattatggcattgattaaattgctgtcagatatttttgtaccaatcattcctgctcttgttgcaggtggtctattgatggcattgcgaaactttttgacatctgctggactttttggacctaagtcaattgaagaaatgtatcctgctatcaagggtatttctgcaatgattcagcttatgtcagctgcacctttcatgttcttaccaatcttagttggtatttcagccgctaaacgctttggagcaaaccaattccttggtgctgcgattggtatgattatgacaacaccagatcttggtggttcaactgaatattggaatatttttggttatcatgttgctcaaacaaattatgcttatcaagtcattccagtattagcagctgtttggttgttatcagtattagaaaaattcttccacaaaaaactaccatcatctgttgactttacatttacgccattattatcagtaatgattactggtttcctaactttcacagttattggtcctgtaatgttattggtatctaatggaatcacagatgcaattgtttggttgtataatacaactggatttattggaatgggtatctttggtggtacttattcacttattgttatgactgggcttcaccaatcattcccagcgattgaaacacaattactttcagcatggacaaatggtgtgggatatggtgatttcatcttcgtagttgcttctatggcaaatgttgctcaaggtgctgctacatttgcaatctggttcttaactaaaaattctaagacaaaaggtcttgcttcatctgcaggggtatcagcacttcttggtatcactgaacctgcgttatttggggttaatttgaaatatcgtttcccattcttctgcgctttaattggttcaggagttgctgccgcggtggcaggtttacttaaggtagttgctgtctcacttggttcagcaggtttccttggtttcctttctatcaatgcaacatctattccattttatgtattgtgtgaattaatcagctttgcgattgcttttgcaatcacttacttctacggtaaaacaaaagctgcaggtgtctttgaagcagaagcagctgctgaacaaacagcagttgaaactccagctgctaaagaagcagaagttgttgctgaaccagctcaaactagtgtttctgctgaaacaattgttagtccacttgctggtgaaacagttgctcttacatcagtaaatgacccagtattctcatcagaagctatgggtaaaggtatcgctgtaaaaccaagcggaaatacagtttattctccagttgacggtacagttcaaatcgcttttgaaactggtcatgcttatggtcttaaatctgacaatggtgctgaagttcttatccatattggtatcgacacagtatcaatgaatggtgaaggatttgcacaaaaagttactgctaatcaaaaagttaaaaaaggcgatgttcttggaacatttgatactgcagctattgcagcggcaggtcttgatgatacaacaatgattattgtgacaaatactgccgactattcagaagtaactccagtagctgaaggtacggttgcagaaggtgcagatttacttgaacttaaataagtatatatgtatattttaagaggtgaatattcacctcttttttatatggggcaaaggttgattttacaagggtttgagctatttttgttcttgcgttatcgctttcttttgtgtataatatttagtataaaattagcaattgagggagaaaaaatgactaaattatacggtagtgtagaagcaggtggtacaaaatttgtttgtgcagttggagatgagaatttccaagttgttgaaaaagtgcaatttccaacaacaacaccttatgaaacaattgacaaaacagtagcattctttaaacgtttcgaagctgatttggcagggattgctattggttcttttggtccaatcgatattgatgaaaattcagaaacttatggatatatcacaacaactccaaaaccacattgggctaacgttgacttggttgggttgatttcaaaacactttaaagtgccaatttatttcacaacagatgttaacagctctgcttatggtgaaacaattgttcgtaaaggtgttaagagccttgtttattacacaatcggtacgggtatcggtgctggtgcaattcaaaacggtgaatttatcggtggtatcggtcatacagaagctggtcacgtttatgtggctccacacccacaagacgttgcaaacaactacactggtttctgtcccttccacaaaggttgtctagaaggtatggcagcaggaccatcactagaaggtcgtacaggcattcgtggtgaattgattgagttgaactcagaagtttgggacgttcaagcttactatatcgcacaagctgctgttcaagccactcttctttaccgcccacaagttattgtctttggtggtggtgttatggctcaagaacacatgttgaaacgcgttcgtgataaatttactgctttgttgaacggttatgtaccagttccagatgtaacagaatatatcgtaacacctggtgttgccgaaaatggttctgctactcttggtaactttgctttagctaaaaaagtatcagaacgctaattattaatgtcataataaaccatttagattggggaaatccagtagggctttcttcaatcttttttcatctgaaatcttgcgacgttgatttaaggtgttttcttgttgttagggcaaaaaaagggtataatcgtagcgggttaaaactctgaaaataggaatcattaaatttagataagaattactcattttaatcttgcgagctcatcgcttcaacggtgaattcttgaattagagcgctttttgtgttaaaatgtgatgataagtttatcgaaaggaattgggatggcaaatattctacggactgttatcgaaaacgataaaggtgaattaagaaaattagaaaagattgcaaagaaagttgagtcatatgctgacgctatggcagctttgtctgacgaagacttgcaagcaaaaacaccagaatttaaacaaagatatcaaaatggtgaaacattagatcaattgttaccagaagcctttgcggttgtccgcgaagcagcaaaacgtgtgttaggactttatccataccgtgttcaaatcatgggtggtattgttatgcacaatggtgacgttcctgaaatgcgtactggtgaaggtaaaacattgacagcgacaatgcctgtttaccttaacgcccttgctggcgaaggggtgcacgttatcacagttaatgaatacctcgcaacacgtgacgctactgaaatgggtgaagtttacagctggcttggattgtctgttggtatcaacttggcagctaaatccccatatgaaaagcgcgaagcatacaattgtgacgtaacctattcaacaaactcagaagttggttttgactatcttcgtgacaacatggttgttcgtcaagaagacatggtacaacgtccattaaactttgcattggtcgatgaagttgactctgtcttgattgatgaagcaagaacgccattgattgtttcaggtcaagtaagttcagaaacaagccaactttacattcgtgcggatcgctttgtaaaaacattgacaagtgttgattacgctattgatgtacctacaaaaacaatcggtttgactgattatggtattgataaagcagaagaatacttccacttggaaaatctttatgacttggaaaatgttgctctaacgcactacattgataatgcccttcgtgctaactacatcatgcttttagatattgattatgtggttagtcaaatgggagaaatcttgattgttgaccaatttacaggtcgtacaatggaaggacgtcgtttctctgatggtttgcaccaagctatcgaagccaaagagggcgtgcctatccaagaagaatctaaaacaagtgcctcaattacttaccaaaatatgttccgtatgtacaaaaaattggctggtatgacaggtactgcaaaaacagaagaggacgaattccgcgaagtttacaatatgcgcgtcattccaatcccaacaaacaaacctgtggcacgtattgaccattcagaccttctatatccaacactcgactctaaatttagagctgttgttgcagatgttaaggctcgtcatgaaaaaggtcaaccagtcttggttggtactgttgcggtggaaacatcagaccttatttctaagaaattggttgaagctggcgtgccacacgaagttttgaatgcgaaaaaccacttcaaagaagcacaaattatcatgaatgctggtcaacgtggcgctgttacgattgcgacaaacatggctggtcgtggtaccgatattaaacttggtgaaggtgttcgtgaacttggtgggctttgtgtcattggtacagaacgtcatgaaagccgtcgtattgataatcagcttcgtggtcgttcaggccgtcaaggagacccaggtgaatcacaattttacctttcacttgaagacgatttgatgcgtcgttttggttcagaccgtatcaaggcatttcttgaccgcatgaaccttgaggaagaagaagctgtcattaaatctaaaatgttgacacgtcaagttgaatcagctcaaaaacgtgttgaaggtaataactacgatactcgtaaacaagtcttgcaatatgatgacgtaatgcgtgaacaacgtgaaattatttacgaagaacgtcgtgatgttatcacagcagaccgtgacttggctcctgaaatcaaagctatgattaaacgcacaatcaatcgtgccgttgatgctcacagtcgtgcagaccgcgaagaaggtatccaagcaatcttgaactttgccaaagcaaatttggttgctgaagattcaatcagcttgtctgatttagaagatttagactttgaagcaatcaaagaaaacttgtacgaacgtgctttgaaagtttacgatgcacaaattgctaaattacaaaaccaagaagctgttatcgaattccaaaaagttttgattttgatggttgttgacaacaaatggactgaccatatcgatgctcttgatcaattgcgtcaatcagttggtttgcgtggttatgcccaaaataaccctgttgttgaataccaagctgaaggtttccgcatgttccaagcaatgattggagcgattgaatttgatgtcacacgtacaatgatgaaagctcaaattcaccaaaaagaacgtgaacattcatcacaacgtgcaacaacaatggcagaaaagaatattgctgcgcaaactgttcgtgctcaagctgacagcgatgttgatttttctaaagttaaacgcaatgacttgtgtccttgtggctctggtaaaaaattcaaaaattgtcacggtcgtaaacaattttaaaaagtcgatagaaaattctgaaaaatcaattgaaaacccgcctgaaaatggtataatagaaaaaatctaaagtttctattcaggagaggaaaattcatgtcatttaaagcaacaagtaaaaagattaatttcgatgctctcaaggaagaatctgccttaacaggtgacgttttagctaaaaaagaagcacgtgatcgtgaactagaagctattattaagggtgaagatgaccgtgttcttttggtcatcggtccttgctcatctgataatgaagaggcagttcttgaatatgcacaccgtttggcgaaacttcaagaagaagttaaagatcgtgtctttatggttatgcgtgtctatacagcaaaaccacgtacaaatggtgatggctacaaaggcttgatgcaccaacctgatacgtcagaagcaccaagcttgattaatggtatcaaggctgtacgtaaccttcattatcgcgttatttcagagacaggattgacaacagcagatgaaatgctttatcctgaaaatcttccattggttgatgacttagtttcttatattgctattggtgcgcgttctgttgaggatcaacagcaccgttttgtggcatcaggtatcagcgttccaacgggaatgaaaaacccaacatcaggtaacttaaatgttatgtttaatggtatttatgctgcacaaaacaagcaatctttcctatttaacggcgaagaagttgaaacgtcaggtaacccattagcacacgcaatccttcgtggtgcaactaatgagtatggtaaaaatgtaccaaattattattatgacaatgttattgatacgattgagcaatatgaaaaaatgggcttagaaaatccatttatcgttattgatacaaaccatgataattcaggtaaacaatatttagaacaagttcgtatcatccgtcaaacattgattaaccgcgattggaatgaaaaaattaacaaatatgttcgtggtttcatgattgaatcttacttagaggacggtcgtcaagacgcaccagaagtatttggtaaatctattacagacccatgtcttggttgggaaaatacagcacaacttgttcacgaaatttatgacacattaggtaaataatctatgggaatacatcaaaaaagtgcaaaaattgatattgcacaagtaaaagaactttcaaaattagaaggtgattttcttgctaagaaagctgcgcgtgatgcagaattggcaaaaatcatcacaggtgaggacaatcgtatccttttggttatcggtccttgttcatctgataatgaagaggctgttcttgaatacgctaaccgcttagcgaaacttcaagaggaagttaaagacaaaatctttatcgttatgcgtgtttatacagcgaaaccacgtacaaatggtgatggttacaaaggattgatgcatcaacctgatacctcaaaattgcctgaccttatcaatggtattgctgcggttcgtcatcttcactatcgtgttatcacagaaactggcttaacaacagcagatgagatgctttatccagcaaatcttccattggtagatgacttggtttcttatcatgctattggtgcacgttctgttgaggatcaagaacatcgttttgtggcatcaggtattgatgttccgacaggtatgaaaaatccgacatcaggtaacttgaacgttatgtttaacggtatttatgccgcacaaaataaacaaaactttatttatcataacgctgaggttgatactgacggaaatccattggcacacgcgattcttcgtggagcaacgaatgaacatggcgaaaatgaaccgaattattactatgatgatttgttgaaagctattgagctttatgagaaaatgggcttagaaaatccatttatcgttgttgatacaaatcatgataattcagggaaaaattaccttgaacaaattcgtatcgttcgtcaaacattgattaatcgtgattggaatgataagattaataagtacgttcgtggtttcatgattgaatcttacttagaagatggtcgtcaagacgcaccagaagtatttggtaaatctattacagacccatgtcttggctgggaaaaaacagaacaacttattcgtgaaattcatgccacactaagtcatgattcttttgaagaattgctattctaataattgaataacctatggggctggggaattttctcagctccttagttttggaaatcattaagcggttaagctgataaaacgtttgaattggtaaaaaaatcgtttttcataaaggagacgtatgattattggtcacggcattgatttgcaggaaattgatgcaatcaagcgagcctatgagaaaaataacagatttgctaagcgagtgttgacggacaaagaattccaatgtttttcggagcaaaaaagcacgaaacgacagatggagtttttggcgggacgctgggcggcaaaagaagcctttgcaaaggcaatggggactggaattggaacacttggttttaaggacattgaaattttaaacaaccaattaggtgcgcctgtgattacccggtcacctttctcagggaagtgctttatttcactttctcatacaggaaaccttgttcaagccagtgttattttggaagataatagctgaacaatgaaactgaaacaaaaacattcaaaaaattttctagctttggaggagataaaatgatttcaagtttacacagaccaacaaaggcagtcattgatttagatgccatttgtcaaaatattgatgcggttaaagccaatataccacaagataaaaaagcttttgcagttgttaaagctaatgcttatggacatggtgccacaaacgtagcgcaagctattcatcatcttgtggatggattctgtgtgtcaaatattgatgaagctttggaattacgtgaagcaggtattgaggaaacaatccttattttaggtgttattatgcctgatgaggtggctttggcgcgtgattaccatgttactttgacagttgctagtcaagaatggcttgatttggcaaatgaacaaggtattagcttagctggtttggacgttcacttgaaagtggattctggtatggggcgaatcggtgtgcgcagtcttgatgaagcagaaaatgtgattgcgaatttgaaaaaagctggggctaacgttgcaggtatctttacgcattttgcaacagcagacgaagctgacgatacgaaattcaatgaacagttggaattctttacgaatttggttaacaatttgagcgacaagcctgccattgtccatgctagtaattcagcaacaagtatttggcatagtgaaaccatttttaaccttgttcgacttgggattgtcatgtatggattgaatccaagtggaacagagcttgatttaccttatccgcttaaaccagcgcttagtttggaatcatcattggttcatgttaagacgattcctgctggtgcaacggttggctacggtgctacctatactgctcaaaaagaggaatatatcgcaactgttccaatcggttacgcagacggttggacacgtgatttacaaggtttctcagtgcttgtgaatggcgaattttgtgaaatcgttggacgcgtgtcaatggatcaaattaccattcgcttgccagaaaaacttccaatcggaacgaaagttactttgattggtcaagagggcagtaaggttatttcagcgacagatttggctcaaaaacgtggcacaatcaattacgaagttctttgtctattgagtgaccgtattccacgtgtttattcaaaataaatgataaaaagattctatcttgctgtaagaaacttgcggcgatttagaatctattttttgttataatagtacaaagtgaggtcatatgaatttacaatcatcaattgtggaattaaaaggaataggggctaagtcggcggaaaaattttataagttagatatttataccattgaagatttactgctgtactatccttttcgatatgaagattttaagagcaagcgtgtttcagagcttgctgatggggaaaaagctgtcattacgggaacggttgtgacacctgcaaatgtgcaatattatggttataagcgtaatcgtctgtcgtttaaaatcaagcagggcgaagcggttattgcgatttctttttttaaccagccttatttagcagataaagtcgaacttggcagcaatatcgcgatttttggaaaatgggatgccctgaaatcagcggtgactggtatgaaaattttagcgcaagttgaagatgatatgcagccagtttatcgtgttgctcaaggtatttcacaaaatgcactggtcaaagctatcaaatcagcttttgaaattggtgctcagaattggttgcctgaaaatttaccgcaggtgcttttggataagtatcgtttgttagggcgtgctcaagcaacggctgctatgcactttccgaaagatttagcagagtataaacaagcacttcgtcggataaaatttgaagaactgttctatttccaaatgaatttgcaagctttaaaggcagacaataaatcagaagctaatggtttggcgattgcttatgatgagcaaaaagttgttgataagattgcagctctgccatttaccttgacgggtgggcaaaggcggagtcttgatgatattttggcagatatgcgttctggtggtcatatgaatcgtctcttgcaaggggatgtcggctctggtaagacggttgtggctagtcttgccatgtacgctgcctatacggcaggttttcaatcagctttgatggtgccaacggaaattttggcggagcagcattttgaaagtttgacccagctttttccagatttgtccattgcaattttaacatcagggatgaaaacagcagccaaacaagcggcactttcggcgattgcggatggttcggtagatatgattgttggtacgcatgcgctgattcaagatgcggtaacttaccaccgcttggggcttgtcattactgatgaacaacaccgttttggtgtcaatcaacgtcgtgttttccgtgaaaagggcgaaaatccagatgtgctcatgatgactgcgacaccaattccacggacacttgctattacggcatttggtgaaatggacatttcgattattgatgaattgcctgcaggacgcaaaccgattattacgcgttgggttaaacatgaacagttggaagttgtgcttgattgggtcaaaaaagaattgcaaaaaggggcacaagcctatgtgatttcatctttaattgaagaatctgaatcacttgatttgaaaaatgctgttgccttgcacgaggaattgtcagcctattttgcggatagtgcaaccgtagcgctcatgcatggtcgcatgaaaaatgacgaaaaagaagctatcatgcaagatttcaaggcacaaaaaagtcaggttttggtatcgacaaccgtcattgaagttggtgttaatgtcccaaatgcgaccattatgattattatggatgctgaccgatttgggcttagccagttgcatcagcttcgtggacgagttgggcgtggagataaacaatcttatgctattttagttgccaatcccaaaacacaaacaggaaaagagcgcatgaaaattatgacagaaacaacggatggttttgttttagcagaagccgaccttaaaatgcgtggttcaggtgagattttcggcacacgccaatcaggaattccagaattccaagtggcagatattgtcgaagattacaatattctcgaggaagctagacgcgttgcaagtcagattgtttccgaaaaagattggcaaaacaatccacaatggcaaattgttagccaaaatctcaaagacaaaggaacttttgattaaggtttatgaaagttttctgcaaggataggttaagctttgctccttataatgaccctatcaaatgaaacgagaggtaaagcttatgacagtaaaagtaacctacaaaaagtattttgccaaaaaaattcatgtgaaaccagcttacggaaagtaagctgaaaaaagagtactcttttttgataaaatcgctatggcagtagggtaaaatcccatgataagacacataagaccatagaaaatatcgagctcagctgacggtggctgggcttttttggtgcttttaaagttaatttttagctcaaaaatgtcaaaatgctgcaaaaaaataaaaaatatcgaaaatcaataaaaaagtgttgcaaaacataaaaattgtgatatactaaatatatcgaaaaacgataaaagattttcgaaaaagaataattacatattgtaaaacggatttaaaaactgagctcacaacaaatccaagaaaaccatttttaggagatttatcatgaacacaaaaactatcgaaaacatcaccaaaacagtcgctaaagtcgctatcaatcttgcaactatccttctagctttaactattattgctgatttggtttcacatatttacggttatgatactgtccacgttggtcattatggtgtcattgattggtcaatcggtaaggaaacgaacacatggttggtgactgctttaaccattctaacaaacagcgctatcatctatggtcttgcaaaattaaaagtatttatttcagaattcacaatcaaagaagttttaactgacaaaacatatcttttcttgaaacgtgcaactatctacacatttgttgtctcattgcttcaaaatgtcttgtcaacatctctcaaccaagcaaacattatctttgacttttcaatctgtggctacattctactagttactttagcagttaaatacttccgtacacgtcgcttagcttaataaaaaaggatacgatttaaggagaatatcatgaaaaaaacaaactataaagccttgaaaattgctaatatttttatcaatattgtgattgctgttattgtcatatcaacgataatcgctattggactttcggtgactcaatcacatttagctttgactaatcaagtaggcaatggcatcgtatttgatattaacattccagaaaaactgttacattcgccagcttttattggattaaccgttattgtttctgctctttggattgctttgcttgtttgggttaaaatgttctttcaaaatattattgataatcgcatttttactcaagacaatgttaaactagcgcgttatgttgaatataattttatcgctttggcatttttggatagctggttccaaagtttatgttctggttcagaggtgcttaaccttgttaatgtagcatacttggtggctgcttttgtagtctgggtattctcaatgattttaaaagaagcaaatatcatcgctgaagaaaacgaatttacgatttaaaggaggaagcatatgattcgaattaatcttgatgttgagctggcaaagcggaaaatgaaatctggggaattggcggaacgtattgggattacgaatgctaatctctctattcttaaaacaggaaaggctaaagctgttcggttaacgactttaaatgccatttgccgtgaattgggttgccagcctggggacattttagaatatattcctgattaataaaaaatctgagacactgtctgtcagtttggcagaatcaatgtttcagatttttttgtattaattaaccttcaatgtattctttgagggcttgtccttttaagccagcgtttaaggcaatgagcaatttcaagcgtgctttttgggcgttgagttctttgacaaacatgacaccagctttggcgagttggacaccgccaccttcataagcataaactggctcggcgattccgttgaaacaacgtgaaacgagaacaacaggtacaccttgtttgattaaatcaacgatttcttgagctgcgcgtggtggcacatttccagcgccaagggcttcgacaacaacgccacagacattgctaggatttaggaaactgataatgccgtctcctcccataccagcgtaagcttttacaataggaaccgtccctgaaatatcctgcaaatcaaaacggacacgtgggtcggtcgttctaaagaaaagaatgtcatgttttgtaatcagaccaagtggaccgtggattggtgtttgaaaggttgaaacgttagtagtatgcgtttttgtgacgtatttggctgcgtgaatctcatcgttcatgacaacgagaacaccttttccgatagcttggtcatgactagccacacgaagggcactaagataattataaacaccgtcactaccaagctcgtttgatgagcgcatagcacccgttaggacaataggaatattgggaatttccattgtatcaagaaaataagccgtttcctctagggtatctgtgccatgagtgatgacaatgccgtcatagttatcagcgtttttcttaatctcttggtagagttttagcatatgtttaggtgtaatgtgcgggcttggaacattaaaaaaatcaagtgccgtcacttgaatgttttcaagattaaccccaacatgattcattggattatcagtatctgggcggacattacctgcttcatcagcgtgcatagaaatggtaccaccagtatgcagaacaaggatttttttcattattataaaacttcctttaaaaatgtgttataatctattttaacataaagatggagggcaaggaaccgatttggcgataaaagcagtcttttttgatattgatggaactcttttaaatgaccgaaaaaatgtgcaacaatcaacacaaaaagccattaaaagtttgaaaaaacaaggaatttttgttggtctggcgacagggcgcggaccaagttttgtacaaccgtatcttgaaaatcttggcttggattttgcggtaacctataacgggcaatatatttttacacgtgaccaagtgctttatcataatcaattgcctgtttcaaccatttatcgtattattcgttatgcgagtgataggcgccgtgaaatttctctgggaacggcatctggtttagttggttcacgtattattgatatgggaactagccgttttggacaagtggttagcacgattgttccaaaacgttgggcaaaagcggtggagcgcagctttaagcatttgattcgtcgtttcaaaccgcaaaatttgaacaatctgttaaccattatgcgccagccgatttaccaaatcgttcttgttgcaactgaaggtgagactgataagattcaggaagcttttccttatatcaaaatcacacgtagtagcccttattctgcggacttaatctcaaaagaacaatcaaagataaaagggattgagcgtgtgggtgagatgtttggctttgaattagctgaagtcatggcatttggtgattctgataatgatattgagatgttatcaggtgtcggtattggtgtggctatgggaaatgccaaaagctcggtcaaagaactcgctcactatacaactgacagcaataataatgatggtatttcaaaggctttggctcattacggcttaattcattttgaagttgaagaaagttttgaaagtcaagacgagaatttcaataaagttaaggattttcatcatcttatggacggtgagacttgcgaaacaccacgattgtatggcattgaagaggcgacacatcgttcggattttaaagtggaagagattgtcgaatttctacatgcgacaagcaaaggcaatccagaagcgtttgaaaaatcgatatcagatttgcatgctgccattgataaagcagtaaataaagtacgaagtaaagaacatccagaaacaccgctggttggtcaggtagatgctttgacggacttgttatatttgacctatggttcatttgttttgatgggagttgacccaaaaccattttttgatacggttcatgaagccaatatgggaaaaatctttcctgacggaaaagcgcattttgaccctgtaacacataaaattttgaaaccggatgactgggaagaacggtttgcgcctgaacctgctatcaaacgtgaacttgaccgtcaaattcaaaaatcattaaatcgtaaaaaaagaaaccaagctagtcattaaactaacttggttttttttgtaattatagaagattgattaaaaattattattaaagagtatcgatatggcgcaagacttagaaagtcttttcgctatcacgaacaactagcaaatcgacttttgcatgacgcatgatgtattctgatgaagaaccgataagaagtcgttcaaatgtgttgagaccagttgccccaaccataatcaagtcaactttttctttgtcaggaatatctcgtgctaggagagttttaggattaccaaattcgataacttgtttgactttcgttaatcctttttcgcgtgcttgttgctcataatcgttcaatacatcttttgcttcctgttcgagcttttcataaatgtaagtgtcgaaagtagcaacactttgaagtgcgcgtgtatcaataacgtgtgttagtagcaactcagcattattgcgtagtgcaatgtttacccctttttcaaaagccaactctgattcataagaaccatcaatcgcaattaggattcgttcataatgatgtgacataactgcctcctccttaattatgctagcaagagcgtaaaagtgaccgaaaatgtaggattaataagaaatcttggttttagtgacctaaggttagttatccgtgtgctattacatcaggtaaaagcatcccgcattccaaactttcagcccatatcaataagtttaataagctaattgcgggatgaacaagtagcgttaaacgcttacaattattgttaaaacatccctaagcttattatactctttttatataaaaaatgaaagcgtttgaagtatttttctgaatattttttgctataatagaaaaagcgagggaaaaagtaatgagaaaagatatggtagctgttttaaaagatttgtatcgtcataaatacacatacattttacgagcaacgattttacaactcctaatcacgacagttggggcttatgtcttgtcactgttaattagggttgttttggttggttctgatattccaggaatgacaactgataatatcttttcttttttaaccaatccgttaacattaagtgttttggtgatttatctttttttgctagcttttttagtttacctagaattttcgcttctcgttgagattattcggcataaggaagcaaaactacggttgacttggacgcggttaaaagaagatgcaattgacttttttaaagctatttcaggctggcatttcttagcctttttggtttatcttgttttaacgattccgtttttgaatgtgatgttttcatcagctttgttagaaaatctctatattccgaaatttatctcaggtgagcttttgaaaacgacgaatggaaaactactctattatgggctttaccttgttttaggctacctaaatcttcgatttttatacaccttgcccttgacggtgactggaaaaggtgaacgttttgggcgtaatatggcaacatcttggcaactaacacgtggtaagaaaatttttaaattatttgggcttgctattgttctgattagtgttatagctgttgttgctgtgtttagttttcttggcatcagtttggcggctttggttgatggcgcagataaatcgttttgggttgaaactttattcttatcctttgtttggggagtattgtttgcagggcgactgctgttcaaattagcatcgatttcctacttattacaagtgacagaaaatagcagtagcactttagcacctgctaaccaaggaaaaagacgacatcgtttgttagctttgactggacttattctggtcattggtggtattaattatatatacaatgttttgaaagtgtctggcgaacctgtggagcacttagaagtgattgcacataggggaatggtttcgcaaggggttgaaaattctctggaagctttggaaggtgcggcaaatgctggcgctgactatgctgaaatggatattattttatcaaaagaccagcaatttatcgttagccatgatgataatctcaaacgcttaacgggcaaggatatcacgatttcacaatctaatgccaaagacgttattggtttgaaaacaagtcaaaatggatatcaatcgcaaattgtttctttcgaggattacgtcgctaaggcagagcaactcggtattaaattgttagtcgagttaaaacctacaggcaatgaacctgcaaattatgaacaattgtttgttgataaaatgaaagagctgggggttgagaaatcttatatgaccatgtctgcggacctaaagacaattgaaacggttgaaaaacttgacccaacaatcaaaacaggttataccatttctttgcaaattggaaatttcaccagtcagaaggtggatttttatgcgattgaggacttctcatataatgagctcttagcacgtacagcgcataaaaatggcaagaagatttacgtctggacgattaattcaactgatgatattgaaaaatacgtcgaaaccagtacagacgggattattaccgattatccagatttggtgagtgatattgaagtatatttagcaaacgataatagctatcttgactattttttgcgtctaactaacctttcttggattgaaaatttgtaagggaaagtttataatatctaaaacgaggtaaaatctatgaaaatatttgataaatcttcaaagctagaacacgtttcttacgacatccgtggaccaattcttgacgaagccactcgtatgattgctaatggtgaaaaaatcttgcgccttaatactggtaacccagccgaatttggctttacagcaccagatgaagttatccgagatttgattgccaatgctcgcaatagtgaagcctattcagatagtaaagggattttttctgcgcgtaaggcaattatgcaatattgtcagctaaagggattcccacatgtggatattgatgatatttatctaggaaatggtgtgtctgaattgatttcaatgtctcttcaggcgcttcttgatgatggcgatgaagttttggtgccaatgcctgactatccattgtggacagcttgtgttagcttggcgggcggtaatgctgttcattatctttgtgatgaaaaagctaactggtatcctgatattgatgatatcaaatcaaaaatcacttctaacacaaaagcgattgttgtgattaaccctaataacccaacaggcgctttataccctgatgagcttcttaaagaaattgttgaaattgctcgtcaaaatgatttgattatctttgctgatgaaatctatgatcgtttggtaatggacggcaaaaaacacacagcaattgctagcttagcaccagatgttttctgtgtgtcaatgaatggtttatcaaaatctcaccgaatctgcggtttccgtgttggttggatggtcttatcaggtcctaaaaataatgttaaaggctacattgaaggacttaatatgttggcaaatatgcgtctttgcgccaatgttttaggtcaacatgttgttcaaacatcacttggtggctaccaatcagttgatgaattgttgattcctggtggtcgaatctatgaacaacgtaacttcatctacaaagctgttaatgaagttccagggctttcagctgtgaaaccagacgcaggactttacattttccctaaaatcgaccgtgaaatgtatcagattgatgatgacgaacaattctgtttggaattattgaaacaagaaaaagtcatgttggttccgggtaaaggattcaactggaatgagccagaccacttccgtatcgtttatctaccacgcgtggaagaattggcagaagttcaagaaaaattaacacgagtattaaatcaatatcgacgctaaagagaaagctattaaaatgttggaaatttacagtttgattgaaaaatcaactttaaaatccgaacattttgatgctttttttgattaaaattcgcttaaaaagaatgcgtttacaaaaatgtcagaagataaaggaattttcagataattgtttgcaaaataaggattcctttgatataattgtaacgcaaataacgcaaaggaagtagaaaatgccgaatttattagaaaaaacacgaaagattacatcaattttgcaacgctctgttgacagcttagacactgaattgccatataatacaatggctgctcaattagctgatatcattgattgtaacgcttgcatcatcaacggaggaggtaaccttcttggttatgcaatgaagtataaaacaaatactgaccgcgtagaggaattctttgatgccaaacaattcccagaaagctatgttaaagcggctagtcgtgtttacgacacagaggcaaacttgtctgtggataatgaattgactattttcccagtagaatcaaaagacatctatcctgatggcttgacaactattgcaccaatttatggtggtggtatgcgtctaggttctcttatcatttggcgtaatgataaagagtttttagaagatgatttgattcttgttgaaattgcctcaacagtagttggtatccaattacttaatcttcaaactgaaaatcttgaagaaaccattcgtaaacaaacagctgttaatatggctattaacacgctatcttactcagaaatgaaagctgtatcagctattttaggtgaattagacggtacagaaggtcgcttaactgcatcagttattgctgaccgcattggtatcacacgttcagttattgttaatgccctacgtaaattggaatctgcggggattatcgaaagtcgttcattgggtatgaaaggaacttaccttaaagtcatcaatgaaggtattttcgataaattaaaggaatataattaatgaaaaaagctcttatttcaattgactatacctatgattttgtagcagatgatggcaagttaacggctggaaagccagcacaagctattgaagaagctattacgcgtgtcaccaaagaagcctatgaagcggggaattatatcttctttgctattgacggtcacgatgagggggatgattttcatccagagacaaaattgttcccacctcataatatcaagggaacaagtggtcgtgatttatatggtcagttagctgatttatatgcagaaatcaaggaagatagcaaagtattttggttggataaacgtcattattcagccttttcagggacggatttggatattcgattgcgtgaacgtcgtgtgacaactgttgtattgacaggcgttttgacggatatttgtgtccttcatacagctatcgatgcttacaatttaggatatgacattgagattcctgcggaagcagttgcgagcttaacagaggaaaatcatcagtttgcactaaatcattttaaaaatgtcttaggtgcaaagattgtttaaaagttggaagaagtgggagaccacttctttttttcatgttaaagaggcttaaaatatggtataattttaaggactgtattgtaatttaggttacgatttaatttaatcaaggagagatagagatgaaaatttctgaagaagaagttcgtcatgtggctgatttgtcaaaattgtccttttctgaagaagaaacaacagaatttgcgacaactttgtctaaaattgtagatatggtagaactcttgaatgaagttgatacagagggcgtccctgtaacgacaacaatggcagatcgtaagactgttatgcgtgaagatgtggcagtagctggtgatgaccgtgatgagctctttaaaaatgtgcctcaatctgaaaattactatattaaagttcctgctatcttagaggacggaggagatgcctaatgtcatttaatacaaaatcaattgatgagttgcataatcttcttgtcaataaagaaatctcagcggttgaattaaccaaagcaacacttgaagatattaaagaacgtgaagcagctgttgactctttcatcactgtttctgaagaagcagctcttgcacaagcggcagccgttgatgaaaaaggaattgatgctgataatgtgatgtcagggattcctttggctgttaaagataatatttcaacacgtggtattttaacaacggcagcgtctaaaatgctttacaactatgaacccatttttgatgcaactgcggttgaaaaactttacggtaaggatatgattgttatcggtaaaacaaacatggacgaatttgctatgggtggttcaactgaaacatcatactttaagaaaacaaaaaatgcttgggatcatagcaaagttcctggtggatcatctggtggttctgcggcagctgttgcctcaggtcaagttcgtttggcattaggttctgatactggtggttcaatccgccaaccggcagcctttaatggtgttgtcggtttgaaaccaacttacggacgtgtgtcacgttttggtttgattgcatttggtagctcacttgaccaaatcggtccattttctcaaacagttaaagaaaatgcacaattgttgaatgtgattgctggtcatgatgctaaagatgcgacatcttctgaccgcgaagtggctgatttcacagctaaaattggtcaagatattaaaggcatgaaaattgctttgccaaaagaatatcttggtgaaggtatcgacccagaagtgaaagaaacaattcttgaagcggctaaacactttgaaaaacttggcgcaacggttgaagaagttagccttccacacagtaaatatggtgtagcggtttactatatcattgcctcatcagaagcttcttcaaacttgcaacgttttgacggtattcgttacggttaccgcactgaaaactacaacaatcttgaagatatttacgttaacacacgtagcgaaggttttggtgatgaagtgaaacgtcgtatcatgcttggtacatttagcttgtcatcaggttattacgatgcttacttcaaaaaagctggtcaagttcgtacattgattattcgagattttgaaaaaatctttgcggattatgatttgattttaggtccaactgctccaagtgtagcctttggtttggatacccttaatcatgaccctgttgctatgtatttggcagatattttgacaattcctgtcaacttggctgggcttccagggatttcaattcctgctggatttgctcaagggcttccagttggtatgcaattgattggtccaaaatacagcgaagaaactatctaccaagctgcagcagcctttgaagcaacaactgattatcataaacaacaaccgattatttttggaggtgacaaataatgaactttgaaacagtcatcgggcttgaagtccacgttgagttaaatacaaattcaaagattttttcaccgacatcagcacattttggtaatgaacaaaatgccaatacaaatgttatcgactggtcattcccaggtgttcttcctgtgatgaataaaggtgttattgacgctggtattaaagcagccttggcacttaacatggatattcaccaaaatatgcactttgaccgtaaaaactatttctatcctgataatccaaaagcttaccaaatttcacaatttgatgagccaattggctacaatggttggattgaaattgagcttgaagatgggtcaactaagaaaattcgtatcgaacgtgctcacttggaagaagatgctggtaaaaacactcacggtactgatggttattcctatgttgaccttaatcgtcaaggtgtgccgttgattgaaatcgtttcagaagctgatatgcgttcaccagaagaagcttatgcttacttaacagctcttaaagaagtcatccaatacactggtatttctgacgttaaaatggaagaaggttctatgcgtgtggatgccaacatctctcttcgtccatatggtcaagaagaatttggtgtgaaagctgaattgaaaaacttgaattcatttaacaacgtgcgtaaagggcttatctatgagcaaaaacgccaagcacaagttcttcgttcaggtggtcaaattcaacaagaaacacgtcgttatgatgaatcaactggtgaaacaatcttgatgcgtgttaaggaagggtcatcagattatcgttatttcccagaaccagacctaccactttacgaagtgtcagacgaatggattgaatcagttcgcaaaacattgccagaatttccaaaagagcgtcgtgccaaatatgtcaatgaatttggtttgacagcttacgatgctgcgcaattgacagcaacgaaagcaacatctgatttctttgaaagtgcagttgcgcttggtggtgatgctaaacaagtttctaactggttgcagggtgaagttgctcaattcttgaacagcgaaaataagacacttccagaaatcttgttaacacctgaaaatcttgttgaaatgcttgctatcattgctgacggcactatttcatcaaaaattgctaagaaagtctttgttcatttggctaaaaatggtggttctgcgcgtgaatacgttgaaaaagctggtttggttcaaatttctgaccctgctgtgcttattccgattatccaccaagtctttgaggacaatgaagctgctgttgctgacttcaagtctggtaaacgtaatgccgataaagccttcactggattcttgatgaaagccacaaaaggtaaagcaaacccacaagttgcccttaaattgttggcacaagagttggcaaaattaaaaaaagactaataaattaaaatcatccttcggggtgatttttttgtacaagtatgacagaatttttagaaagattattttacaaaaagtgtcagaagtggtgtgttttctttgattcaaatatgttatactgatagctgaatttatttttgatgtgttgaatggagttaagatgaataagaatttaaagggaacaattatggtgcttatggcaggtattgcttgggggatttctggcatctcagggcaatatcttatggcacatgggatgaacattaacttgttgacaagcgtgagattgattgtctcagggcttttgttgactgcaatggcgatgatttcgcaaccacagcatttttttcgtgcgataaaacagccgaaagttcttggtggtatcgctgtgtttgccattattgggcttttgatgaatcaatatgcgtatttgatggcaattcactacacgaatgctggtacggcgacggttttacagtatgtggcaccgattattattttggcttatgtgtcgttgaaaaataagcaggtgccgacattgtcagaattctttgcgattctctttgcaattttaggtacctttatcattgcaacgcatggtcattttgatggcttggcaatgactccgaaaggctttttctgggggctattttcagcagtaacttattctttttacattgttttgcctgctaaattaattcgtgaatttggcagttttacggtgattggacttggcatgcttatggggggcgttgtttttccaatcgtgacacgctcatggcagtatcctctagtgttaacatcaggtaattggttagctttatttgggattatcattatcggaactgtctttgcttacactttcttcttaaaagggactacgattattggggctgtgaaagggagcttgcttgcagcgatagaaccagtctcatcagtttttttctcggtaaccattatgcatgaaattttctacccaatggattttgtgggaatgattttcattatcgtagccgttttaacggtttctcttcgtgacttaatcgctgtgcgtaaacaattgcattaatcataatattaaagggttatagttgagcagatttgcttgctataactctttttgttttgccccttgacattcttgtaaaagaagcttaaactatattttgttagctttctaacaattagctaactaacaaaaatgaggaaacgttatggaaaaaaatatcggacgtttggtcaaaaaggcaagtaatcaattgggacgagagtttgaccaattcgcaaaaccttttgatttgactggtatgcagatgtctatcattgattttttaagtcaaggtgtaaaggaagaatatttccaacaagacattgaaaaagaatttaacattcagcgttcaacgacgacggtacttttgcaacgaatggagaaaaaggcactaatttatcgtcaagtatcacaacaggatgccagacaaaaatctgttcatttaacggagaaagctcaaggtttagtggaagaatgtcgctcttacttcagaaaccaagaaaaagagttggaaaaaaacttttcagaagagaatattgccatttttgagaaaattttacagtattacatgaaagaaaaataggaggactcatgtcagaagaaaaaatttcacctaaagtcattagagccattgttggtgcgggaatgttatcattttgtggtgtggttgtcgaaacagctatgaatatcacatttccaaccttgatgacagaatttggaattaatacctcaacggttcaatggatgacaacgatttatcttttggttgttgcgtcagttgtgcctttgtcagcttacttaaaacgttcatttaagacaaaatctgtctttttagcagccaacttgttgtttattttgggtgttttaatcgatgctattgcaccaagttttgtcattcttttatttggtcgtgtggtccaagggattggtgtcggaattgcccttcctttgatgtttaatatcattttggaccaagtgccaatgagtaaaatcggtgcaatgatgggggtgggaacgttgattacagcggtcgctccagcggttggaccaacatttggtggtttggttgcttcaaacttaggttggcgttttatttttgttctgttgattccgctgttgttaatttctttggcgttaggtgtgacttctattgaacagaaaaatgaagtggcgcgtgaaaaattggatatccttagcgtgattgcgattctttgtgcctttattggtctgattttaggaattaataatcttgctgattacgattttcttagcttgcctgttttaggtagcctatttgttggtattgcaggtcttgtcgtgcttgtgaaacgttcagctcaattgactgtgccaatcgttgatttgtccgttttgaaaaatggaaaatttgcaggacacgttgtggcatttttccttttccaaattgttaacttgggattatcattcttgatcccaaactatgttcaattggttaatcattcaacatcaacggtagcaggtcttttggtttttccaggagcgtttattggtgcttgctttgctccatttagtggaagcatcttggaccgtttgggagctaaaaagccaattatctttggggtaagcatgcttgtctttgctctttgtctttatagtatttttggcttgcatttatcaaatgcttggttgacaattttctacatcttatcaatgggtggaactggaattgcttttggtaatgtcatgacaagtggtcaaaaacaagtagcgcttaaggagcgtgcagatgctaacgcaatttttaatacactacaacaatttgctggcgctgttggaacaacaatcgcttcattgattgtagccctaagccaaacaaacagcagccttagttactctgtagcaacagcccaaggctcacgcaatgcctttatcgtcttgctaattctagcagctatcgaacttgtcatcttactacgagttgttgacggaaaagaaaaataaattatagagagagtggcttgccactctttttttattaaatttccttatgtgggaatggttttcaattcgccatattttggcaaatatgttaaaatgaatagtaaaatatattttttggagaagaatttgagtatagacgattataggccgaccttcgtggttgaggcagtttatgatttaagagcagatgatttattacgacgtgggattcatgccgtgttagtggatttagataataccttaatcgcatggaataatcctgatggaacgcctgaagtgcgtgcatggttagatgagatgactatggcggatatttcagttgttgtcgtatcaaataacaagcattctcgtgtgaatcgtgcggtttcgcgatttggtgtggactttgttagccgtgccatgaaacctttcacacgcggtatcaatatggcaatcaaacgttatggttttgatcgtggtgaggttatcatggttggtgaccagttgatgacggacattcgtgcggcacaccgtgctgatattcagtccgttttggtcaagccattagtgacttctgatgcttggaatacaaagattaatcgttggcgcgaacgccgtgtttgggctaaacttgaagaaaaatacggaaaaattcaatatcaaaaaggaatttaatggaagaattattatgtattggctgtggagccaaaattcaaacagaagataaggaaaaggcaggatataccccaaaagctgctcttgaaaaaggtttagagagtggcgaattgtattgccaaagatgttttagattacgtcattacaatgaaatcaccgatgtgcatattactgatgatgaatttttgaaacttttgcacgaagttggtgatagtgacgcccttgtggttaatgttgtggatatctttgatttcaatggttcagttatccctggcttgccacgttttgtttctggcaatgacgtcctacttgtcggaaataaaaaggatattttgccaaaatcagttaatgatagcaaagtgacacaatggctgacagaacgtgcgcacgaagaaggacttcgtccagttgatgtcattttgacgagcgcccaaaatcatcaagctatcaaggacttgattgaaaagattgaaaaattacgtcgtgggcgtgatgtttacgtcgtgggtgttacaaacgttggtaaatcaacccttatcaatgctattatcaaagaaataacaggggaaaaagatattattacgacatctcgcttccctggaacaacccttgataaaatcgaaattccattggacgacggtagttatatttttgatacaccagggattattcaccgtcaccaaatggcacattatcttggggataaaaatttgaaatacatcagtcctaagaaagaaattaaaccgaaaacttatcagctcaaccctgaacaaacgctgttcttggctggtttgggacgttttgattttatctcaggagacaagcaaggttttacagcttattttgacaataatttgaaattgcaccgtaccaagttagctggtgctgatgctttctatgacaaacatgtcggcagtcttttgacaccaccgacagacaaggaattagctgattttccaaaattagtccgtcatgaatttaccattaaagctaaaatggatgtggtttattctgggctgggttggattcgcattaaagcttcgcaagatagccctgttaaaattgctgcttgggcgccagaaggtgtggcagtgttgcttcgcaaggcattgatttaaaagaataaaaagaaaggaagttcaggtcagttttgagtgacttgaacagaggcggaaaatttactgaaaagccgactgaacaaattaagattttttgttgagtgtgttttcagcggattttcatgcctgatatgataattatgttaacatcaaaacaacgtgcttttttgaaatcacaagcacactcaatgaaaccaattgtgcaaattgggaaaaatggtcttaatgaccaaattaaaacaagtgtccgaaatgctttggatgcgcgcgaattgattaaggtaacacttcttcaaaataccgatgaagatattcacgaagttgctgaaatcttagaagatgaaattggttgcgatactgttttgaaaatcggacgtatccttattctttataaagaatcgtctaaaaaacaaaaccgcaaaatctcaccaaaagtaaaagaattgaatcaataaagtcaagtttacgaattgacaatgtcgtttaaagagttagtcgtttaagaagtcgcctggcttggaggtagtcaatatggcattagaattgttaactccattcaccaaagttgaattggagaagaaagaaaaagataaaaatcgtaagcagattggaattctaggaggtaatttcaatcctgttcataatgcacatctcgtcgttgcagaccaagttcgccaacaattgtgtttggataaggtttttcttatgcccgaatacgagccaccacacgttgataagaaaaatacaatcgatgaaaaacatcgcttgaaaatgcttgaattagccattgaaggtgttgatggtttggggattgaaaccattgaattggaacgtaaaggcattagctatacttacgatacaatgaagcttttgattgaaaaaaatcctgatgttgattactatttcatcattggcgcagacatggtggattatttgccaaaatggtataaaattgatgaattgattaaaatggtgcaatttgtcggtgttcaacgtcctaaatacaaagctggaacgtcttatccagtgatttgggttgatgtgccgctgatggatatttcatctagtatgattcgtcatcattttgaaaatggttgccgtcctaatttcctaatgccacaggcagttattgactacattgagaaagaaggactttatcatgacttatgaggcttataccgcagggattgaacgtgctgagcttttaggcaaagttgcatcagttatgagtgaaaaacgttttaaccatgtccttggagtggaaaaaactgccattgaattggcagagcgttatggttatgatacggaaaaagctggactggctggattaatccacgattatgccaaagagatttcagaccaagaatttttagatttgattgataagtatcagcttgacccagaactaaaaaaatggggcaataatgtttggcatggcatggtcggtatttataagattcaagaagatttgggcgtgacggacaaggaaatcttgcgtagtattgagactcataccgttggttcaagtgatatgtctttgctagataagattgtttatgtggcagactatatcgagccaaatcgccgttttcccttggtggaagaagcgcgcgtgattgctaaagaatcgttagataaggcggttgcctacgaaactgttcataccgtagaacacctagcgcaccaagcctttcctatcttcccacaaaccattgagacttataatgcgtatgttgggtttatgaaagatgacaaatgaaaacagctctgttagtggttgatattcaaacagccttgatagaggctaaaccgtatgctgttgataactgcttgtctgtctggcaaaaagcaatcgccacttgtcgtgagaaaaacattgaggtgatttacgttcgccacaatgacgacgaactactaacaggaagtcgtggctgggaaatttacgaagctattgctccagaagttgacgagaaaatctttgataagcattataatagtgcttttaaagaaactcatttacagacttatctggatagccaagttattgagcggctgattatcattggcatggcaacgaattattgcattgatacgactgttaaggtggcgtttgagtttggctataatttggcagttattaaaaatggcacgactacctttgctgaaagagaaattacagcagaacaattaatacagcattatgaaagtacttggaatggacgttttgcccaagtggctgatttagaagaaattttaaaagaggattaaatggataaaaaagaattactagaattggttgtcaaggcagctgatgaaaaacgtgcagaagacatggttgtcttagacctttatggattgactagtgtgacagattattttgtagtggttagcgctatgaacacacgtcaactggacgctattgcagaaaatattcgtgaaaaagttaaagaagctggtggtgatgccagtcatgctgaaggtgatagtcgtacaggttgggtacttcttgaccttaatgatgttgttgtccatatcttctcagaagatgaacgtgaacactacaacattgaaaaactttggcacgaagcaccaatggttgacgtatcagaataccttgcttaattttgcagcattattcttataatctggggcacttgtctcagattatttcattctaagaatgatagaagtttgataggacaaaacaatgaacaaaaactacgaaaaatttgcatcggtttatgatgctatcatggatgactccctttatgataaatggactgacttttcgctccgccattttccaaaaaataagaaaaaactcttggaattagcctgtggaactgggattcagtcagtacgttttgccaaagctggctttgacgtgacagggcttgatttgagtgaggatatgcttgaaatcgcaagaaaacgtgcaaaagcagctagcgaagctatcgagttcaaacaaggtaatatgctcgatttgtcgcaagcaggaaattacgatttggtgacctgttattcagattctatctgttatatggctgatgaagttgaggttggtgatgtctttaaacaagtttacgactgtttgaatgaggacggagtattcatttttgacgtgcactcaacttaccaaactgataccgtttttcctggttattcttaccatgaaaatgcagaagaatttgccatggtttgggatacctatgctgatgaggcaccacattctgttgtgcatgaattgactttcttcctgcaagacgaggatggacgcttcacacgctatgacgaagttcatgaagaacgcacttatgaagtcctaacttacgatatcctcttggaacaagcaggcttcaaatcattcaaactctacgccgactttgaggacaaaaagccacgcaaaaaatcaaaccgctggttctttgtgtgccagaagtaggggggaatccgctcaaaaattcgcttaattttttactaaaatgagcgaattagggaaaagttgattggattagaattaaaaaggagcactccatgactgttactggtattattgctgaatttaatccttttcataatgggcataagtatttgttgtcgcaggctgagggggtcaagattgttgccatgtcgggaaactttgtccaacgtggtgagcctgcgattgtggataagtggacacgcgcggaaatggctctgcgaaatggcgctgatttggtggttgaattgccatttttggtggctgttcagtcagcggattactttgcacaaggtgcggtggacattttagagcgtttaggtgtggataagttggcatttggcactgaagaaaatctggattatcaacacttttcacagatttatggggataatcaacagaaaatggtggattacttgcaaagtttgccagataatttgtcttatccacagaaaacgcagaaaatgtgggagacttttgctggtgtgaactttactggaaataccccaaatcatattttagggctttcttatgccaaagcttgcgctggaaaagctattcagctgactccaatcatgcgtcaaggagcaggttatcactcgcttgagacagaaacaccctttgcgtccgcgacaaatttgcgtgtccacagaaaagacaaagcttttgtggataaattcatgccaaatgcggatcttttcctcaacgcctctcaggtgacttgggatgattatttccctttgctcaaatatcaaatcctgacaaatgctgatttgacggggattttccaagttaatgaagaactagccagccgtattcgctctgctattaggagtgtagcgactgtggacgagttagtggataaagttgccacgaaacgctacacaaaggcgcgtgtgcgccgtattttggcttatattttggtgggagctgtggaaaagcccttgccagaagctgttcatgtgctgggatttacgccaaaagggcaggaacacctcaaaacggtgaaaaaatctgtggatatcgtggctcgaatcggtgtaaaaccgtgggatgtggtaacgcaacaagccgaccaagtttatgcgctaggaaatccacacattcaagagcaaaactggggaaaagttccagtgataataaagaagtaagcggttataatgtaacataaaagtcatcagataaggtagacttttacagtatattaatagctattgtttaaagtataagattttaaaaatttatttttattgttgtgatataatgaatttaatatttaggaggtttttatgctttatggaatttagtgcagataaaattacaattaaagatttattctcagtaggaagaaaatatacaattcctagatatcagcgggaatattcatgggagcagtcacagctaaaagattttcttaatgacatagttaacaatattaattttatagaaagaaagacatcgaactatttttttggtacagtaatattggtaggagatatggttcagcataaatttcctttgcaaatagttgatggtcagcaacgccttacaacatttactatctttttgtcagttttatccgatttagcaaaagaatatgagaaaatctccaataatatttggaagtatgttataggtgaagatgataatggtgatgaatataaaatattagagaacttaactgcttcaccttattttgatgaaaaaatccaaagtaggaaacaattgggaattgtatcagaagatttgtatgatggaagtgaagagtatagaatattaaaagcctacgaattttttatgcaagagcttgctaatgttatatctagagcatcaagtgaggcagctattgaaaaaattgaggttattaaactcttaagagatcagttaattagtagcgaaatgatttatatatgttctcctacagaggaagacgttaatgtaatctttgaaaatattaattcaaaagggcaaaagctatttgcattagatttgataaaaaatcaaattttttcagttgaggataaacaagttcctctggatcaagctaaagagttgtggggacaaattaaaaataacgtaaacaaaggaagcattggtatcgatgttttttacagacatttttggatttctaattatagtcaaagtaaaaaagatgatttgtataaaaaatttttaacaactatagaccaaaatgaatattttaatttcttaaaaaaattgagagatagttctaaaaattatatgtttttaattgaaccacagttcgagatgtttgatggacattcaatttcaaagggtgattttgaagaaattaaagattttttgaacaatgtaaataaagtatttaatatcacacaggctagaatattcttgcttgccttatatgaacaatatatgttagggaacgtgagatttaatcgattgaaggattgtatacaatttattgaagaatttcactatattcataatggtgtttgcaaagaaagaaacaataagctagaaaataaatatggaaaatatgctagagaattgagaaaaggtaatggtagaaaacagattaatacaactctagaagaatttattgaagattttagagaaatgttgcctcctaaagatacatttattgatgcatttataaaattgtcttatgttaagaagccgaaaacacataaagaaactttaaataatcttatttctagatatagtataagaaaatatgaggaaattctgcacaaaacaggcaagtataataaaattggaggatcaatagaacatattgtacctgaaagcagcaacgatatagcaaaaaataatattggcaatttattaatattggaagaagaaattaacagggaagctgattcaaaaacagtaagtgataagtgcaataattataatgaatctgattatcattctgtaaaacaattcttagaagaatacggtgctaattttagcggagaaaatataagggaaagagctgaagtgattggaaatagaatttatgatgcgatggtttcttaatggttagtttaaatagttttgctattattcccgtcccccattttacacagccccgtcaaagtgctataatattaaggattacgaatttagctttgctagttcagtagttcaatgatttggggctttagggtgtccaaatcaattaatcatgctaaaataaaaataatctttacaaaggagactacccatgggacgtaagtgggccaatattgttgccaaaaaaactgccaaagatggtgctaactctaaagtttatgcgaaatttggtgttgaaatctatgttgctgctaaaaaaggtgaaccagatccagaatcaaactcagctttgaaatttgtacttgaacgtgcaaaacaagcgcaagtaccaaaacacgttatcgaccgcgcaatcgataaagcaaaaggtaatacagacgaaactttcgttgaaggtcgttacgaaggatttggaccaaatggttcaatgattatcgttgatactttgacaagtaatgttaatcgtactgccgctaacttgcgtactgcatttggtaaaaacggtggtaacatgggagcatctggttctgtatcttacatgttcgataaaaaaggtgttattgtctttgatggtgatgacgcagatagtgtttttgaacaattgctagaagctgatgttgatgttgaagacgttgaagcagaagatggtgttgttactgtttacacagcgccaactgatcttcacaaaggtatcgaagctttgcgtgctaatggtattgaagaattcaaagtaactgaacttgaaatgattcctcaatcagaagtgacacttgaaggtgaagatcttgaagtctttgaaaaacttgttgacgttcttgaagatgacgaagacgttcaaaaggtttaccataatgtatcagatttctaatatcagacatcattgataaaatgataggatattcagttcaaaaaggctgaatatcctttttatttttggtgataagctaaggctatcttggtgataaaaaaaatctattggcaattggtgcgaatttaggatagaataatcttatcacagtaagataaccttaaaactaatgaaagtgaggacaccaaatgaaacaagtcattgttgggattacaggaaatatcaaagaaatgccagctatgtcaggaatgcattttgatgcggtttctcgtcatttatcagatggtgttaaggtagctggaggggttccaatcatcattcctgtgggaacaccagaccttgctaaaacctatatcagtatgattgataaattagttttatcaggtgggcaaaatgttacgccagaattttacggtgaagaaaaagaagttgatagtgacgattacagcttagaacgtgatgaatttgaatttgctttggtgaaagaagccattcgtcaaaataaaccgatttttgcagtctgccgtggtatgcaattgcttaatgttgctttgggtggcactctcaatcaaaaggttgataatcattggcaagatgatatttcaggaacatctcatgaagtggaaattttgccgaatagtcgtgtcagccatttggtaaaatcaggttcatggattaattcatttcatcatcaaagtgtcaaagatttggcacctaatttgattgcgacagcgcgtgatgttcgtgacgggacaatcgaagcctatgaaagcaaacacggtgcgccgattttgggaattcaatggcacccagaacttcttttagaaaaaagtgaaagtcgtttgttgttcaattatttggtaaaaacactataagatagataaagctgatgtcagtcagcttttttggtatccagatatttagggggaatgaaaatgaaaaaagttttattgggattggcagttttattgagtgctagcttgagtgtccgtgtggaagcggctgataaaaaagcagttgtcgcaacggctggtgacatcaagcctttttcttatcagaataagaaagggcagctaacaggctatgacattcaggtgataaaagcagctagcaaacatatcaacggttataagattagttttaaaaagacggcttgggattcgatatttgttggtttggatagcgatatttaccaagtggcggctaataatctatcctacacggaagaacgtgccaataaatacctctattcggtgccgattgctaaaaatccgttggttctagtcgtgaaaaagggctctaaaatcacttctttggatgatattggcggtaagacgactcaagatgatacaggcacatcaactgctaaatttgttgatgattggaatagtcagcatagtgataacccgtcaacgattgactattctggagaagatgtgaccaagcgtttgttggatttggatgatggggaatttgattatttgatttttgataaaatctcagttgaaacgattattaaacaaaagaatctggatttgacggttattgagctgaatacagatgataatccgaataactacattatcttttcaagtgatagcaagcagctacaaacagcttttaataaagccgtgaagaaattgtataacaatggtactttggaaaaattgagccaaaaatatttaggtggtagctatttaccagaagcatcagcattagaggtgagcaaatgacagcagaactttatgaaaaattaaccaaaattcgtcgtgatattcatcaacatccagaagtgtctgaacgtgaatttaatacgacagagttcctgaaaaatcatatttcaaatcttgggattcgcattgtcgaaacaggtttaaaaacaggatttattgccgaaattggacaaggtgagccgattattgcgcttcgagctgatattgatgctctgccgattcgagaagccaatacatttgattatgcaagtaaaaacggtgcaatgcacgcgtgtggacacgattttcaccaaacgagtttactgggagcagccgaattattaaaggcaaaagaagccgacatcaagggaaccattcgattgattttccagccagctgaagaagtggcgactggtgctgatgcggtgattgaagcaggtggtatcgaaggagtgtctgcagttatcggctatcataataaccctcatcttaaaccagggcaaattggcttgcgctctaaagcgattatggctgcggttgaaaaatttaaggttacggtaactggcgttagcggtcatgctgcgcgtccagattttggcattgatacgattttgactattacgaccattgtaaataatttgcaggtgattatcagccgaacggtttcgccatttgatgcggcggtgctatcggtgacacatattgatgctgggacgacatggaatgttttgccggactcaggctattttgaaggaacgattcgatcatttacaccagaaaatcgtcagcatttgcgcgagcgatttaccaaaattgtgaaaaatacggccgagcaatttggcgcaaaagttactatcgagtggggaaaaacaccaacggtgacttataacgacgagacattgacaccgcttatttttgagcattcaaaacagtttgcggaagttttagaagttgctccattaacaggaggagaagactttgcgacctaccaagaacatattccaggcgtttttgccttgattggcagcaacggtgataacaatgcagcagatttgcaccatgatacctttaccgtaaaagatgaagctctaccaacagctgttaattattatgtgcaaaatgctctgtatctactagactattaccgttctaaaaaggattagccgtgtgtgataagttttatttatcactgtgatagattttaagtatttgttaagtgagcttggtgatgttaagatgtaagcatacctttgaaagggagtttcaaaaataggagacaattatgacattaatgaaaaaaatccttggtgtaacaggtgttgcactagcctctacaacctttttagcagcttgttcatcaagctcatcttcatcatctagttcttcaggaaaggaagaagttgtctttgcaacagttggaacaacggctccattttcatatgaagaagacggtgaattgacaggttatgatattgaagtcgcaaaagcagtctttaaagattcagataaatacgaagtaacattcaaaaaaacagaatggtcttcaatctttactggacttgattcaggaaaatatcaaatgggtggtaataacatcagctatactgaagaacgctcagcaaaataccttttctcatatcctatcggttcaacaccgtcagtacttgtcgtgccaaatgacagcgatataacatcttacgatgatatcggtggtcattcaacacaagttgttcaaggaacgacaaccgctgctcaattggaagaatacaatgaagaaaatgcagacaatactgttgacatcaattatacaaatgaaaacatcactcaaatcttgacaaatctaaatgacggcaaatatgatttcaagatttttgatgccccaactgttaattctgtcattaagaatcaaagtttggataatttgaaaaccattgatttggaatcagaagagcaaccatacatctatttcatctttggacaagaccaagaagatttacaagaatttgttaataaacgtttgaaagaattgcaagaagacggtacattgacagaacttgctgaaaaataccttggtggagattacacgccttctgctgatgatttgaaagttccaacatcagattaaaaagtgtgggttatagttttaaactataagaaaaccttattaataacaatttgaaacctagaatcaaataggataaaataaaaacactgattaaaacgaaagaggacatatctatgaaattgaaaaaattatttggattagctagcgtagcttttgcgtcaacagtcttgttggcagcatgtggaagttcttcaagttcatcatcttctgatgacacaacacttaaagttggtatcatgactttggatgatgcaacagaaccactttgggacaaagttaaagaattggcagaagacaaaggcgttaagattgaacttgttgaatttacagactacaatcaaccaaacgaagcccttcaaaatggtgaaattgatgtcaatgctttccaacacaaatatttcttgagcaactggaattctgaaaatgatggaactttggtagaagttgctgatacgcttcttagcccaattcgtctcttctcaggaactgacagcgacggcgatgcaaaatacactgacgttagtgatattccagataaaggaactatttcaattcctaatgacgcttcaaatgaaagccgtgccctctaccttcttcaatctgcaggcttgattgaattagacgtttctggtgatgaattggctacaattaaaaacatttcatcaaatccgaaaaacttagatattaaagaagttgatgctgctcaaactgcttctacattgacatcagttgatgctgcagttattaacaactcttatgctcaatctgctgatgttgactatgacacaacactttacaaagaagctgttgatgaaaactcaaatcaatggattaacgttattgcagcccaaaaaggttggaaaaaatcagacaaagctgatgctatcaaaactttagtttctgtttaccaaacagacgaagtcggaaaaatcatcgaagaagcttcagacggtgctgatattcctgcatgggatggcgcaacaacatcttcatcatcttctgatgacgattaatatagcctattgaaaatgaaaaattagaggctgggataacttcccagtctctaaatcattatttcgtattttatggagagttaataacttctaaattgcttctttgttgggagtggattttaaaataattagcaatatggtagaatagtaacttggagagttttcaaaactgtgctatcgatgtgttttgaattttgagaggtagaaaatggtagtaagtgataataatcagttgcagaagtttgaaaatgatgacgttgctcaatattattttgagattttacgtcagttaattgctaaaaaatcgatttttgcacagcagattgggttagcagaagtagcaaattatctaggcgatatttttactgaagctggtgctgaagtgacgattgatgatacttgtacggcgccgtttgttttggcacgttttaagagcaatagacctgatgctcagacgattattttttacaaccattatgatactgttccagctgatgatgaccagccttggtcatcaaatccttttgaattaaccgtccgtgatggctacatgtatggacgtggtgttgatgacgataaagggcatatcacagcacgcttgacagccgttcagaagtattgccgtgagtttggagattttccagttaacattatatttattatggaaggttcggaagaatcagcttctgtgggtcttgaaacctatcttgaaaaatacgctgatgagctccgtggcgcggatttattggtgtgggagcaaggtatttcaaatgccaaaggtcagattgaaatttctggtggaacaaaaggtattgtcacctttgatatgattgttcattctgctaaggttgatattcattcgaaatttggtgcggtcattgagtcagcatcatggtatttgcttaatgcgattgctagccttcgtgatgaaactggtcgcattttggttgacgggatttatgaccaagtcattgagccaagtgagcgtgagttgtcacttatcctagaacatgccaatcttgatgccgataacctaaaaacactatatggtttgaatttgccaatgttgacaagggataaggaaaagttagttcgaacgcttttctttgaaccagctatcacgattgaaggaatttcaacaggctatcaaggtcaaggtgtcaaaacgattctaccagctaaagctcaggctaaaatggaagttcgtttggttcctgggcttgagccaaaagatgttcttcagaagattgaacaacatttgcaacaacatggctttgaacaggtggagttggtttacacattgggtgaaaaggcttatcgtagtgatatgtctgccccggctattctcaatgtgattgagattgcaaaggcattttcaccaaatggtgtttcagttttgccgacgactgctggtactggaccaatgcaccaattctttgaagcattagaagttccgattgcttcttttggtattggcaatccagacagccgtgaccatgctggagatgaaaatgttaatttggcggattattacacccacattgaaatgattgaggagttgattaagagttatgacaaaaccgattattaatttagaacatattgacattacgttttatcagaaaaaacgtgagatagaagcggtaaaagacgtttctattacgattgacaaaggtgaaatttatggaatcgttggttattctggagcaggaaaatcaaccttagttcgtacgattaacctattacaggcaccaacttctggaaaaattacgattggtgatgatgtgacatttgacaatggtaaagtgcagttaaaaggtgcagctttacgtcaaaaacgtcaaaaaattgggatgattttccaacattttaatttaatggtacaaaaaacagcgcgccaaaatgtggcttttgcgcttcgtcattcaaaattatcaaaagaagaaaaagacaaaaaagtcgctgatttgcttgaattagtaggcttgtcagatcgtgctgaaaattatcctgctcaattatcaggtgggcaaaaacaacgtgttgcgattgcgcgtgctcttgccaatgacccagaaatcttgatttctgatgaatcaacatctgccctcgatcctaaaacgacaaaacaaattttggctttattgcaagatttgaatcaaaaacttggtttgactgtggttatgattacgcacgaaatgcaaattgtcaaagatatctgtcaccgtgttgctgttatgcaaaatgggcacttgattgaagaaggttctgtattggatattttctcaaatccaaaagaaccattgacgcaagaatttatcaaaacagctactggtattgatgaagccttggttaaaattgaaaagcaagctcttgtgcaacatttgccaaaagacgatttgcttgttcaattgaaatacgcaggaacatcaacagacgagcctattttaaatcagatttacaaacaatttgaagtaacagcgaatatcctttatggaaatattgaaattctagacgatacaccagttggtgaaatgattgttgtcctatctggtgaagccgatgcgcttgctgctgcccaaacagctattcttgaagctggaattgaattaactgtattgaaacgaggtgcttaaatgattgaatggattgagacaaatttaccaaatgtttaccgcattggttgggaaggaacgaattcttggtcagatgccttttcagcaacgctttatatgactggctggtcatttgtgattggtggtattttagggcttttaatgggattatttttagttctaactggaccaaatggtgtgcttagcaatcgtattgggtttaaaattttagatattttcacgtcaattgttcgtgccattcctttcatcattttgttggctattttgaaaggtttcacctatgctatcgttggaaccaacctaggtcgaacagcggcgctaattccgctatcagcagcgacatttgccttctatgctcgtcaggttcaagttgtcttttcggaaatggatagaggtgttattgaagccgcacaagcttcaggagctaccctttgggatattatcaaaatttaccttagcgaaggtttgccagaacttatccgcgtctcaacagtaacgctcatctcacttatcggtgaaacagctatggcgggtgcgattggagcaggtggtcttggttatattgccatttactacggttataaccgctcagcaacagatgtcactatcgttgcaacaatctgtatccttatcctagtctttattatccaatttatcggagacttcctcactaaaaaactaagtcataaatagaaaaaagcacttctgtgaaaacagaagtgcttaatgattgttttgtgctattttattgtccatgtctgtaatgagactagcaagagtgatattctcgagagaagctttaaaattttcttgaacctcatcaatacgtggttgtaaaacggagttcaccacgcgaccaactgggcaatttgggttggtatcatcattagctttaaaaataggcttgtttttatcttcgactgcttgaaaaatatcccaaaaagtgagttcttgaggtgcttttgtcaaatgcgctccgccaacaccagcttctacctttacgagttcagctttttgtaatttacccaataaatttcggacaatcacaggattggtctggatactgttagcgagaaaggtagatgtcactttttctttattttcaaaatgataaatagctaataggatatggacagaagtcgctaatcgtgcagagtaaggcattttttctccttgtactaatctaatttgttaagagtattatagcatatttttgttgtaattaaaaaaattacaactttttagttgtaactattgacattacatctgaagaggaatatactatagatgtagttgtaacaaaatatattacaacaaaaaattatttatattttggaggaatcattatgaaaattgcagtagttgccgcaaatggtaaagcaggtcaattaatcgttgaagaagcgcttaatcgcggacatgatgtcacagcagttgttcgtagttctaataaatcaaaagctcagaaagttattgaaaaagacttatttgacttaacaaaagaagatttggctggctttgatgtggttgtggatgcttttggtgcttggacagaagaccaacttcatcttcacagcgagtcacaaaagcatttagcagatttgttgtcaggaacagatacacgcttgatgattgttggtggtgcaggaagtctttatgtcaatcctgaacataccgtgcaattggttgacacaccagaatttcctgatgttttcaaaccattggctaatgcgcaacgtcaatcattggcagaaattcgtgaacgcaatgatgtcaaatggacatttgttagcccagcagcagattttcaagctgacggtaaccgtacagggcaatatattcttgctggtgaagaattaaccacaaacgataagggcgaaagtatcatcagctatgcagactatgctattggctttgttgatgaaattgaaaatagcaaacacatcaaagaacgcatcagtttacttggaaaataagatagaataaacccaccaaactcatttgagcttggtgggtttgtgttagtaatcatattatctatgcttttttgacttttgtgataaatatgctaagaatgaagccgacgagggcaaagctaatccaacccattgagaattgtccaaatggaacaattgttgtgaagaattcaacgaggcttgttggaagtgtgaataagccagtcattgtagataatgttgaaaaggcatcataaagtgctggaatggcggtgaaaccaatggttaagcgataaacaattggactattgttgaagaatttagcaaggagtaccaaaagtacaatcacgactgtaagtggatagagaaggtaaagaactggcaatgaccatttaatcaactcagaaagaccaccaaagtagaagaataaggcaatcaaggtaaagatacttgcccaagcaacgtgagacagttttggttgtagtttgtggaaatattccgcgcaggctgtgattagccctgttgctgttgttaaacaagcaaggaaaatcgctgccgcaagaactgctcgtccaatgcttccaagatagaaataagctgcttgtcccagaacatttccgccatcgatagcagcgccattaaatgtaaattgtccgttagtaaatgtaaataagctttgtgatgttgcgccgatacgagccacaaaaatgtaaataagcgcaagcaatacggttgcaatgataccagatttgaaggtcaaaagagcgacttctgactgatttttggcaccgtgttgtttactagcatcgataacgataatggcaaaagcaagggaagcaagagcgtccattgtaccatatccttgaatgagccccgcaacaaaaggcacgtctttaaaggcattactaatatcattagcggcgttataagcagtaccaatgttaccagctggtttgataaaggaagcaatcaccaagattgcaagaatgataagaagcgcaggtgtcaagtatttcccaatacggtcagcaatcttgcttggtttaatggctaaaatataagaaagaccaaaaaagagcaaaccgtaagcaatttttacgccaatgctatcacctaaaattggttggatcccaatcgaaaatgacgtagcacctgtccttggaatcgcaaagaaaggtccaattgacaaatagagggcaattgaaaataacaaggcataatggcgtgaaacagggcgtgcaaaatcctcgacgtcgctagcaccagaataagcaacagcaacgactccaagcaatggcagggtgacgcctgtcaagcagaagccaagaatagccaaggctaagttacttccagaatatatgcctaaaaaggcagggtaaataaggttacccgctccaaaaaatagagcaaataacatgaaaccgataatgacataaatatttttaaatggtttcatatgtcctcctaataatgaaaaatgcttacaattacttttcaattgagtaaaattgtatgacaattattatagcgaacagagaagctgtcgtcaatagaagaaaagttcaaaaattataaacaaattctcataaaaaactgacaagccgtgttctaaagctataaaatgcgctaaataatgtcataaaaagtatcatcaaaaaatttaaattgtgaaaaaatttggaaaatagtgtatttaagcgctgtcatttaacaaatcttgtgagaggatgtttgacgaagtggcagttttgtattattataaaaaagttattactatatgaggagttaactatgagacattttattggcgtttggaatagaactagcctaatcaaacgcatcattatcggagttatccttggtttaattctgggagtagcctttccaaaattatcaggaatcggcattttgggagatttatttgtaggtggccttaaagctgttgcaccattattggtttttgttttggttgccaatgctttatcacaacatgaaaaagggcaaaagaccaatatgtcaacagttgtcggtctttaccttgttgggacattggctgcggcgttagtggcagtattagttaactacattttcccattgaaattgacattagacaatgtagcagaatcggatttatcagcaccagaaggggtagcagaagttttcaaagacctcttgctcaaagttgtggataaccctgttaatgccatcgcatctgctaactatatcggagtgctagcgtgggcggttgtctttgggcttgcaatgcgcaatgctagccaacaaacgaaagacttactacaaaccatggcagaagtaacgtcgcaggttgtacgttggattattaatttagcgccatttggtattttaggtttggtctttaacaccatttcggataatggtattggaattctggctaattatggtttcttgattgtaactctagttggaacaatgctttttgtggctctggtggtcaatccattaattgcatttgtgatgattcgtcaaaatccttatccacttgttcttcgttgcttgaaagaatctggtttgacagccttctttacgcgtagttcagcggcaaatatccctgtcaatatgaaactttgtgaagatttaggtttgaataaagacacttattcggtatctattcctctcggagcgacaatcaatatggctggcgcagcgattacgattaacgtcctaacacttgctgcggttaacactcttggaattagtgttgattttccaacagctttcttattgagtgtgatttcagcggtatctgcttgtggtgcttctggtgtggcaggggggtctctcctattgattccagttgcatgtagtttatttggtatttcaaatgatattgctatgcaagttgttggtgttgggtttattgttggtgttgtccaagattcttgtgaaacagcgcttaactcatcaacggacgttctttttacagcggtagctgaaaaatctgtctggggtaaaaacaaaaaagcaaaacatagctaatcaccgtagctgggcaaattgctcagctattttttatattaaaccccttgctataacctgtatttataactagttcaagaaataagcttctttaaattgaaccttatttatgataaaataaaacaacatcaaaaaggaggaaatatcattttgagcaatcatttacttgttttacaatcggattttggtttggttgacggggcagttgctgccatggttggagttgccttgcaggaagagccaactttaaaaattcacaatttaactcatgatattactccttataatatctttgaggcctcttatcgcctttttcaaacggtggaatattggccagaaggaaccacttttgtttcagtggttgatccaggagttggttcaaagcgaaaaagtgttgttgctttaacagagaataaccagtttatcgtgacacctgataatggcactttaacctatatcaaaacacatgttggtatcaaggcagttcgagaaatttcagaggttaaaaatagacgcaagaatacagagtattcttatacattccacggacgtgatgtttatgcttatacaggagcaaaactagctagcggtcatatttcatttgaagaagtgggaccagaattacctgttgaagccgttttggaattgcctgtcgttgagacagaaattctggagaatgctgtgcgtggggcagttgatattttagatgttcgttttgggtcattgtggacgtcaattaaacgtgaggagttttatacgttatcgcctgaatttggtgaccgttttgaagtgaccatttttaataacgatatgttggtttaccaaaatcaagtgacttacggaaaatcgtttgctgatgtgcggattggtcagccaattatctatattaattcactttatcgtgttgggcttgctatcaaccaagggtcgtttgccaaggcttataatgttggagttgggtctaactggcgcattgagattaaaaaattaggagtatcattatgaaaaataattcgataaaaaccgttgttgcgacagggattggcgcagccttgttcattatcattggaactttgattaacattccaacgcccatcccaaataccaatattcaattacaatatgccgtaattgctctttttgctgtgatttatggtccgacggttggtttcttttctggttttattggacatgctctaaaagatgcccttcaatatggttcaccttggtggacatgggtgcttgttagtggcttgattggcttggctattggcttattagctaagaaaatcaatattgaaaaaagtcctttaactgcaaaagattatgtttggtttaatgccgtacagattattgctaatgttgttggctgggctttgattgccccttacggtgacattttgatttacagcgaaccagcaagcaaagttttcgctcaaggtattttatcagcagttatcaacagtttgacaatcgctattggtggctcgcttttgcttgccgtgtattctaaaacacgcacgcaatcaggcagcctaaccaaagattaatacagaagtagaagcagggattccctgctcttaatcattttttaggagaatagtcatgaagccctttattcaatttaaggatttcacttttaaatatgatattcaagcagaaccaaccttaaaatctctcaatttaacgattgaaaaaggacaaaaggtactcatcataggtccatcaggttctggaaaatcaacaattggtcactgtcttaatgggattattcctaatatttaccatggggagaaatctgggcagtttacgattgatggtaaagaagcatttggcttgtctatttacgacaagtctcatttggtttctacggttttacaagacccagatggtcaatttattgggttaaccgtggcagaggacttggcttttgcgcttgaaaatgactgtgtttctttggaagaaatgcaagaaaaagttgctcattgggcaaaaaggcttgatttaacagagtttttagacaatcgtccgcaagatttatcaggtggacaaaaacaacgtgttagtttagcaggggttctgattgatgagagtccgattttactttttgatgagccgcttgccaatctagacccaaaatcaggtcaagaaacgatcgatttgattgaccgtattcatcatgaagaaaaggcgacgacgattatcattgaacatcgtttggaagatgtgctctatcgtcatgtggataaagtcgttttggtgaatgatggtcagattttatttgatggtcatccagatgagctattacggacagagcttttgattcaaaatggcattcgcgagccactttacgtaacggctttgaaagatttgggtgttgatgtgacatcaatggaacatctatcagacctaagtcaaattgatttgacaaatattgccgtgacagcgcccagctcatttcaagaagaagcgccgcaagataagctcttaatggttgaacaactgcattttgcttatcaagagaatcgtcctattttgaaaaatatcaattttgagattaatcaaggcgaacggattgccattgttggaaaaaatggtgctggcaagtcaactttggcaaaagctatctgccaatttatcacgccagaaggcgatattcgttatcgaggacaatcgattatgacggattctatcaaagagcgtgctgaaaaaatcggttatgttcttcaaaatccaaatcagatgattagtcagacgatgatttttgatgaggtggcgcttgggcttcgtttgcgtggagtagatgagcaagacgttgaaaaacgcgtgttggaaacgttaaaagtttgtggtttgtatgaattccgaaaatggcctatttctgcgctgtcttttggtcagaaaaaacgagtgacaattgcttcggttctggtaatgaatcctgaaatcattcttttagatgaaccgacagcaggtcaagataagcgaaattatactgaaatcatgaatttccttaatcagctcaataaggcagggcacactattatcatgataacgcatgatatgcagttgatgttggagtattctgaccgcagtattgtagtgagcaacggtgaaatcattgcggattgttcgccagtggcattattcaatcaaaatgctatcctagaaaaagctaacttgaaaaagactagcttgtttgaattagcagaaaaattagcagttgacccaattgccttgacgcattattacattgaaaaagagggaggtattcatggctagtcatcttattggttaccagagtggtcgtggtttcctttatcaattgtcaggcgccagcaaattaattttctttgttttggtatcggttgcttgtatgacaacctatgatacgcgtttgatagcagcgattggaattgcttcccttgttttgtttaaaatagcaggcattcgttggcagcaagtttcttttgtcgtcaaatttattggcttttttgctcttttaaatgtggtcatggtgtatttgtttgcaccgaattatggcgaaacaatttacggaactaagactattttgctacaaggctatgggcgattttaccttaccagtcaagaattattttatctgtttaaccttgctttgaaatatttttgcacggttccgttggctgtcttatttcttatgacaacgcagccaagtcaatttgcttcaagtttgaatcaaatcggtgtaccttataaggttgcctatgcagttagtttgacgctacgctacattcctgacgtgcaagaagaatttttcatgattcgaatgtcacaagaagcgcgtggactggaactatcacaaaaagaaaaactaatgaaacgtatcaaaggaaatctacaaattgtcattcccttgattttcagctcacttgagcgaattgatacagtgtcaacagccatggaactacgtcgttttggaaaaaataaaaagcgtacttggtacacttatcaaaaatttacaacagcggatttgctgaccattgcgattgctgttttactagttatcattagtttgtggcttttccaccttaaccaaggacgtttttacaatccttggcattaaaaaaaacgtataaaccagaacaattagctgttcaacggtttatacgttttttcttatttcaaataaccaagataatcaaatttttcaaacgtattgtcatttgcaatggcaacgacttcagtattggcttcaaaagcttggttgggattgatatgggtatcaagacttgacgttgattttttacgaataccgattaaattcaggtcgtatttgtgtcgaaggtccagctgaaccagactctttccaacccaagaatcaggaatagaaaattcaatcatagcaatattatcctcaatgtgaataatattttcaatatggtggcgaagcatatttgaagcaactctttttccagagtcgcgttctggtgtgataactttagtcgccccaatgccgtaaagtacctcttcataagtcgcatttttggctttggcaagaatggtttttactcctaattttttacagtgcataatggcaagaactgaagattctaaggtatttccagttgcaatcacaacaacatcacattgcgcaatgccgacggcttttaaaaattcaatctctgtaatatcaccaacagctgccttagttgccatatcagccacatcttgaacgagattttcatgtctatctaaagcaatgacctcttgctcgaatttacttaattcttcaacaacagtacgtccaaaaattcctaatccaagaactccaaaaatcttttttgtcataataatttcctctaaccaacattaatatttgtttgtgcgtagcgaatatctttttctttcttttgcaaaagactaagcaggacagtaatcggtccaacacgtccgataaacataagtgccatgatgacaaatcgccctgcttgcgataatttaggcgttaaatccatggaaacgccaaccgtagcaatcgcagaaatggcttcaaacagcaaagctagcgggtcatgattcggttcaaattccaaaagcaacagatagccgatgattaaaatagtaaagaaaaagattagcacggtcagtgtttgttttatcgctttattggcaataacgcggtggcggaaagtgacttcattttgccctgcaagttcggatttgaaaagcaagaaggcaattgcgactgttgtcaccttaacaccgccagccgtaccaccaggagcaccaccgataatcatttgaatcatataaagaatatttgtcgctgaatgcgtatcaagataagaaatcgttgcaaatccagccgtcctcatggttactgattggaaaaagcagaccatgatttgctgaaaaatggtgtagtgcccaattgtcttagcatttttaaattcgattagccacgtcaatgctgttccaagcagtaaaagaattcccgttgtggcaagcactaagcgtgtctgattgcttaatgagcgagaaaatgcagaaaagcgataaggtttgtctttgataaagtgtttgatagcttttttcaaatccatccaaacagcaaacccgattccaccagatatgattgcggcagcaattgccacattaaccaagggattcagaacgaattgtttaaggctagcatcgccaaaattatcaaacccagcattacaaaaagcagagacagcaagaaaaatggcattaaaaataccgtgccacaagccaaaacgtggaataaaatcaaagagcaatacaatagcaaccaaggactcgatgataaaagtaattttgtaagcatgaaaaaggtaatgcctaaggtcattgttattgtcatagctaagcgctgattgtagcaaactctgctctgataaattcatgcgacgacgtaaaaggtaggtactgattgcaattaaagtaaccaatcctagtccgccaatttgcatgagacacattgcaatcatttgaccaagtccattataaacacttgcgacaggaacgactgataatcccgtcacacaaaccattgaaaccacattgaacaagtggtcaaggtaagtagtgctaggagcgtcggcatagtgaactatcggaagtgagagtaacaaactcccaataaaaatgacgatgacaaaactaaacgttaaccgtcgcgtactcgttaaagatttaaaaatgctattcaaagagtattcctcctaaactccaaaacggttttcaaagccttctaaaagagccttacggctcataacatattaaagaggttttttatttggcatcccagccttacgtgggtatttatttggtgtctcttttttcttttcaagaattgtgatttggcgactatcgccatttggcaattcataacgataattgtctatgagttttgaaaaaagaattgtcatggcatttttggcatctgccaattcttcttcggcagcagaagctttaagagcaattaattgcccaccaacttttaaaaatgggattgtcaattcggtcaagacttggagacgagcaacagctcgtgctgttacaatatcatagcttgcgcggaaatgcttatcttgaccaaaatcttcagcacgtccatggtaaaaatgaactccctctaaaccaagttcatctgccaataaattaagaaaattaatacgcttatttagcgaatcaatgatagtaacatcaatatcagggcataaaatcttgataggaatacttggaaaaccagctccagctccaatatctagcaaacgaatcgcttgatttgttatttttccttgaagaacaggggcaatagaatcataaaaatgtttcaaataaaccccctcttcatccgtaatagccgtcaaattaatcttttgattccattcaaccaaaagctcaaaataacgttcaaattgctttttttgtgtatctgtcaactcaaaaccttgttgactaagtttcttataaaattcttcaggtgtcatgattatcagtaaagaaagcattagcagcctgcaaaacacaaaccaccacaactttctctaatatcctttcaattccaatatacgtcatcttattttaccataaaatcccacccaataacattcttagaaatggttataacacccgaaaaactatttttcctccaacttcctatgtaatcactttaagaattgaaagaaaattgatataataagcctagaaagtatatttttatctatttattttagtagtttatcaaaagcttttgtgtagcggtaggttacaaaaagcaactgattttggaagggtatgtcatacccaaggaggaatttatgatttttgttattatcgctattattgttgttttagtgctttggattattgctgtctataatggtcttgttaaaagtcgtatgcaaactaaggaatcttggagtcaaattgatgtgcaactcaaacgtcgtaatgacctcattccgaatctgattgagactgtaaaaggctacgccgcttatgaagaaaaaacatttgctaagattacagaattacgcagtcaagttgcccaagcagaaacaccagcagaagcaatgcacgcgtcaaatgctcttactaaacaactttcaagcttgattgctgttgctgaaaattatcctgaacttaaagctaataacagctttatcaagttgcaagatgaattgacaaatacagaaaacaaaatttcttattcacgtcaattgttcaatacaacaacagcaaattataatgttaaattagaaactttcccaagtaatatcatcgcaggtatgtttggctttaaaccaagccaattcttggaaacacctgaagatgaaaaagaaacaccaaaagtatcatttgacttctaaaaaatggtgttttgagaagttgttttaaagcaacctttaataaagaaaggaataaaatgaaaggtctcttgaaatggttggtgactttaacaactcaaagagactttctattttcttaataaaatcatgttatacgatcaaatttctagtaacaagcgaagaacggttgttttgattcttgttttcttcttgattttgtcagctattggtgccgcagttggctatctgtggttagatagtctagaattcggtgtggttatcgccttaatcattggtggaatctatgctgctagtatgatttttcaatctacaaatgttgtcatgtcaatgaacaatgcgcgtgaagtcagcgaggaagaagcccctgaactttatcatattgtagaagatatggcaatggtggcacaaattccaatgccgcgcgtgtttatcgttgaagatgattctttaaatgcgtttgcgacaggttcaagtcctgaaaatgctgccgtcgcagccaccacaggattgttagctgtgatgaatcgtgaagaattggaaggtgttatcggacacgaagttagtcatattcgtaattacgatatccgcatttctaccattgctgtagccttagccagcgcagtgactttgattgctagtatcggtagccgcatgatgtggtttggcggaggtggcaatcgtcgccgttcgaataaccgtgatgagggtggtcttggtattttgatgttgctcttttcgattttatcgttaattttagcaccacttgccgcaactcttgttcaattagccatttcacggcaacgtgaataccttgctgatgccagttctgttgaactcactcgcaaccctgaaggaatgattaaagcacttcaaaaactggagcaatcttctccaatgcaccatcctgttgatgaagcaagtgcggcactctatattaatgaccctatcaaaaaagaagaaagaacaacatcattgttcaatacacacccatctatttcggatcgtattgagcgtcttcgtcaaatgtaagtatttttctccttcacacgcttgtgtgaagttttttgttgctacattattcaataagctttattattggtagtaatatgtacagacaataccgtaaaaagttggtataatagtaaagaaattttaaaagaggtagtaataatgatgttttcaatttcggaaataaaaaagaatccagatggaattaattttaattctgttttagaaattaaagaaaaattaatagaacgtaacaaagatgtgctagatgttaaagagatttttgtacaagggactatttcctacgatgatggattatatttgttaaattatacacttgattatacaattacattaccgtcaagtcgctcaatgctgcctgtagatgtacatcaagttgaagaagtctcagaaatttttattgaagcagtggatattcatgcaaaagaagatcttgttagagaaaatcttgttttagtacttgaagaagattatattgatttagaagagagcgctattgataatattttgttaacgattccaatgcaagttttaagcgaagaggaacaaaattctgacacaatgccatcaggaaatagctggtcagttttgacagaagagcaatatgatgccctgcaagataagaagaaaaaagaaaataatccgttttctgctttaaatggattgtttgaagattgatactatttttattaaaaaaaataaaatattcttgaattatcgttaacactttgatatacttttaaagcgatatagtatacttatctttattgtttattttgaggatattataacaaagtgatgaaaatgctataatctttttctcattgggaaacaaagaaggtgctctgtataggagtgtatactttagcaaaatagagattttataatctttaaaataataaaaggttggtgacaatgagtaaaaagattttaattattgaagatgaaaaaaatcttgcacgctttgtgtctttggagttacaacacgaaggttattctgtagttgtagaaacaaacgggcgcttagggcttcaaacggctcttgatgacgattttgacttgattttgcttgatttaatgcttccagatatggatggatttgaaatcacgcgtcgtcttcgattggaaaaagaaacttctatatattatgatgacagctcgcgactctattatggatattgttgctgggcttgatcgtggtgcagatgactatattgtcaaaccatttgcaattgaagaactcttggctcgtgttcgtgctgttttccgccgtcaagatgttgaatctaaacgtgaacaagacagtcaaggaaaagaaggattgcttggtctacgcttaaatcctcaaaatcgttcagcggttcgaggtgatgatgaaatttcgcttacaaaacgtgagtacgatttgttaagtgttcttttgtcaaatgttaatcgtgtaatgacacgtgaagaactgctagccagtgtttggagatacgatacagatattgagacaaatgttgttgatgtttatatccgttaccttcgcggaaaagtcgatattccaggtaaagaatcttacattcaaacagttcgtggaatgggatacattattcgagaaaaataatgataaaatgggaagaaaagtctttatctagaaaaatatcgattttctctttgcttcggattctccttgtgttaactatttttaatctaatcgtgtactttgggactacccaaatctttttagcacgagaacgttacgatgttgagcaaggtgccgaagtagtgagagattttttgtctcaagaaagtgcactgacagttgataatcttttggatctgttggatgagtataatgctacggggtcacttgttgaggaagatgatgcccaatatatcctagataaaagtggtgggattgatgatttgacttctgataatcaagatgtcgccatttttaacaaggataagcaattagttttaacgactgataagtcagttgcaaattttaaaacaggtacagttggcaagacaaaaatctaccgtgcacctgcttttacaggttactattcaacggcgaaagtttactccaaaaacacaagagaagttattggttatgtgacgctttttcaacactttagctcctactatctaatgcgacattgtcttgtggcaatccttttgattgcagagttagttgagattgggttaattttacatgttcttttctcttcaacaaaacgctttttacgtccgttggaagaatttcaaggaattgttagtaatattgctgaaaatcctggtgatttgactgtccgtagtgatattcattctggagatgaaattgaagaaatttctgctaactttgataaaatgttagaccaaattgaagggtatactaaaagacaagcgcgttttgttagtgatgttagtcatgaattacgaacaccgattgcagttattaaaggacatcttggtttactgaaacgttgggggaaagaagaccaacatattcttgaagaaagtttagatgctgcttatcatgaaacggatcgaatgtccattatggttaatgaaatgctagatatggttcgtgttcagggaagttttgatttacacaaaggtgaaaaaacagatttgaaaaaatcaatcgaatttgttttgggaaatttccgtattttgcacccagattttaatttccaattttcaacaagtgtggaagaatgtgtctttgcagaaatttacaaaaatcatttcgaacaggcaattttgattttaattgataatggcgtaaaatattcttctggaagcaaaataatccatgtgactttggacatccaaggagatgatgctattgtcaaagttaaggatgaaggagaaggtatttctcaagaagacctaaaatatatttttgaacgtttttatcgaacagataaatcacgtaatcgtgtttcgacacaaggaggtcttgggattggtttagctattcttaagcagattgttgatgcttatgagctcaatgttagcgttaatagtgttgttgacgaaggcacggagtttacattggttattccgatacttaagacaaaacaagataagacagactgagtttttctctcggtctgttcgtttttctaataaagcatgattgaacagtcattttttattagaaaagggacaaggtttaagaaatggggaaaagttttggctgatatggtcaaactggtattactttcataatgattgattttatgttagaataaagtattaaaataattggtagaatggggtgtttgcatgcgttgtccaaaatgtaattataataaatcaagtgttattgatagtcgccaagctgaagacggaaataccattagacgtcgtcgcgaatgtgaaaattgtcatacacgtttcacgacttttgaacgtgttgaagaattgcccttactagtcattaaaaaagatggaacgcgtgaacaattttctcgtgaaaagattttaaatggtattttccaaagtgctcaaaaacgtccagtatcaagcgatgatattgaacaagttgtttcacgtatcgagcaaaaagttcgtagtgagtacgaaggtgaagttccgagtacagccattggtaatcttgtcatggatgagttagctgaacttgatgagatcacttatgtgcgttttgcctctgtttacaaatcgtttaaagatgttgatgagattgaagaacttctacaacaaattaccaaccgagttcatagtaagaagaaaagaagtaatttaaatgagaccgatcgatgagttttcttatatcaaaaataataaggttttattagattctgatagtcttagccagctgtatcacccagtgattggaaatcacgcggttttgctttatgattatttgttggcattttttgatgatggtgttaaacgtcacaaatttagtgagattctcaatcatttgcaattaagcatgcgtcaggtggaagaagcttttgcaattttgactgctgttgatttgcttgttttgtaccaaacacgtgatgcttatgttttaaaattgcagccagctttgaaccgtgagacttttcttagcaatcctgtctatcgtcgcttgttagagcaggaaattggtgatgttgcagtggctgagctggatattaaaattccgcaagaggctagagatatttccaaaaaattctcggatattttttcagcagaagggacaccaaagccaaaagcaaatgtgtcaaaaaatcattttgatttggatagctttgagcgtttgatgttgcgtgatggcctgcaatttaaagatgaaaaagcagatgttgtttcgatttacagccttgctgacaaatacaccatgaattggtttgatacctatcatttggcaaaaagcacggctattaatggtaaaatttcaccacaacgaatgactgttcagttggaacaacccaaaaatgtgaaatcacaaggtcaaagcaaagagcaatttgacaccaaggaacaagtgattattcgtgaagccaagcaagctaatgcaagagaatttttggagaaaatcaaggcaccacgtcgtgcagtggttaccgagagcgagcgaaaattgttggaagaattagccaacatgagctttttagatgaagtaattaatgttatggtgctttatacgttaaataaaacgcagtcagctaatctcaataaaccttacattatgaaggtggcaaatgattttgcttatcaaaacattacgactgctgaagctgctgttttaaaaatgcgtagctttgcccaacgcaataaagaccgtaaagcacaagcaaaagttgctaaaagcaatgtccctgaatggacagcaaaagaatacaagcatgttgctactgctgaagaaaaagcgaaattggaagaactcaaacgtagcatgttagaagattaaggagcgaatgatggaaaaaatcggacaaaccttggctaaacagcttcgccaaagtcgcacagaccttaatgaattgacccaagttattttagcagataaggaaattgctgattttatcacgtcaaatggcttgactcaggagcaaattaaccgtagcctacctaagtttaatcaattcatggtggagcgtgaaaaatttcaaaatcaggatgaatcctatattgctaaaggttacaagcctgctcttagcatgaatgagggctatgcagatgtcatttatttggaaacacgcgaattagttgaggctaaaaaacgtcaagatattaaaaatcgtgtgactttgattggcttgccagctagtctcaaacacatttcaacagatgatcttgatttaggagacccaaatcgtattgaaatttacaattatttgaacgattatcaaaaaaatcttgagacaggaactcaaaaagggctttatgtttttggaaattttggtgttgggaagtcttatttgatggcttatctagcaaatcgtttatctgccaagtacggcaagtcaacgaccttgcttcattttccaactttctgtgttgatataaaaaatgctatcaatacaggaacggtgaaagagcaaattgaccaaatcaaacaatctgaaattttagttcttgatgatattggggcagaacaacaaagcccatggattcgtgatgatgttttgcaggttattttgcaatatcgaatgcaagaaaatctcttgacattctttacatcaaatcttgattttaaaggacttgaagaacactttgcagcatcacgctcaggtgatgaaacgtggcaagcaaagcgtgttatggagcgtattcgttatttggctcgtgaaattcatctgcaaggtgataatcgtcgctaatcgtaaatcattaaaagtgataaatagataaaagaatttgaaaggaataaattcgacaaaggcatttttgagaaatcaaaatgtctttcgtgtggaaaaatccacttaaaatagttgagactgttttaacgaagctggtactagaagaattatggctttacctactgttgctattgtcgggcgtccaaatgttggaaaatcgactttgtttaaccgtatcgcaggtgagcgcatttcaattgtggaagatgtcgaaggtgttacacgcgaccgcatttacacaacaggtgaatggcttaaccgcaagttttcattgattgatactggtggtattgatgacgttgatgcgccgtttatggaacaaatcaaacaccaagctgacattgcgatgactgaagcagatgttatcgtgtttgtggtttcaggaaaagaaggcgttacagatgctgatgaatatgtttcaaaaatcttgtatcgtactaataaaccagtgattttagtggtcaataaagttgacaaccctgaaatgcgtagtgatatttacgacttttactcacttggtcttggggacccatatccagtgtcgtctgttcatgggattggtacgggagatgtcttggatgctatcgttgaaaatctgcctgttgaggaagaagacgaaaatccagatattatcaaattcagtttgattggtcgtccaaacgttggtaaatcaagtttgattaacgcgattcttggtgaagaacgtgtgattgcaagcccaattgcagggacaacacgtgatgctatcgacacaaactttacggacagcgaaggtcaagaatacacaatgattgacaccgcaggtatgcgtaaatctggtaaggtttatgaaaatactgaaaaatattcagtaatgcgttcaatgcgtgccattgaccgttcagacattgttcttatggttatcaatgccgaagaaggaattcgtgagtacgataaacgtattgcaggatttgctcacgaagctggtaaaggaatcattatcgttgttaacaaatgggatacgattgaaaaagacaaccatacagttgtaaaatgggaagaagacattcgtgaccaattccaattcttgtcatatgcaccaattatctttgtttcagcggcgacaaaacaacgcttgaacaaattgcctgatatgattaagaaaattagcgcaagccaaaacaagcgtattccatcagctgtgcttaatgatgttatcatggatgccattgctatcaacccaacaccaacagataaagggaaacgtttgaaaatcttctacggcacacaagtttctgttaaaccaccaacgtttgttatctttgttaacgaagaagaactcatgcacttctcatatatgcgtttcttggaaaatcaaatccgtgcagctttcggctttgaaggcacaccaatcaatttgattgcccgcaaacgtaaataagacttaaaagcaccgtttgtggtgctttttttgctgcatttggaaaatatcgctaaaaataaaatcaaaaggattattttttcaagctaaagaaggctgaatttgatataataaaaggataaggaaaaaggtggtggctaagagtgggtagaatgattccaggtcgaattcgcaatcagggaatagaactttacgaacaaggtttggttgatattgttagtaaacgagaagaagtaattcaagcgaaagttggtgcacatcatcttcagtatgctttagaagatgaacaggtgagatgtgattgtgacctgtttgccaagaaaaaatattgtgagcatttggcggctttagagtatttcctaaaaaataatacagaaggcaaagagttgtcagatgagcttagttcacatcaagaaattcagcaagaaacgaaaaaagtgacctcatttggtagtgtctttttggacggcttggttatcaacgatgacgacacaacaaaataccgtttagcagcttatggtagtcagagtccctattcatcagattattggtggacgttaaaaattaatcgtttgcctgatgaccgtgcttatgttgtccgagatattaaagcctttttagcggttgttaaaagcgagggctactatcaaattgggaaaaattattttgaacccttgtctttgattcaatttgatgaagctagtaaagacttgattcaatttttatggcgtattttgccagatagtgaccgtgttgatttggagtatattttgccaaatcacggtcgaaatcttgcgttgacaagtgggacatttgaggaaggcatttcattgttaaacgagctttatgatttctcatttgaacacaatcatcagaattatgggcaactggtttttagaccattagatggctcagaagggctgttgtcatttaaagtcattgttcaccgtcaatcaattgaactggttattacagaaaaaacatttcagccactttttgacaatgctttcttattcacaaatggtatgatttacggtttgaatttgaagcaacaaaaaatcttagccgctgttcgtagcctgccgattgagtctgatttagcgaagcatttgttctttgatttggatgaccaagcaaaattagctgctagtttgcttgattttaaagagcttggagtggttgaagctccgaaaagttttgaaattcatgactttgtaccttctttccatttaatgttaaatgaataccaagagattgctttaaaggtgacttttgattatggtatggttaaggtcagtagtaaacgtgaacttgaagacttaccatttgctagtcattttaagcatgaagaacgtgtgtttaggactttagaagccaatggctttgctgcctcgttttcatcttaccatgcaccattggcgaatgaagatttgtacgacttctttaccaataccttggaacaattggaacgtttgggtaaggtaaccttgtctgatgatcttgaagaaatgcgtcagtttgagcgcccacaagtttctgttcagacaaatgatggtttgttggatatttcttttgatttttcaactatttttgaaaacgatattgatgatgccttagaagcactctttaaaaatcaaccttattttgtgaacgacgctggtaaattagttgtttttgatgaggaaacacagcgtgtcagtaatgctttacaaaatttacgagctaagcagctgaaaaatgggcatttgcaattagaagccatttcagcgttccaaatttcagatttattccaagacaatgaccgtgtgacattttcaaaagaagttgaacagttggcgcacgatttgagacacccagaaaattttgaggtcaccattccaaatttaaacacgcagttacgagattatcagatgactggtgttcgttggttatctatgcttgaccattacggatttggtggcattttagctgatgatatgggacttggtaagaccttgcaaacaattgcctttctagcctctaaattaacgccagagacacgcattttgattttatcgccgtcaagtttgatttacaattggcaggatgaatttacccgttttgcaccagaaattgatgtcgttgtggcttacggtttaaaagcagtgcgtgatggtattatttcgcaaaatcatcaggttgtgattactagttattcctctttccgtcaagattttgacgaatatagtcaattgaattttgattatttgattttggatgaagcgcaagtgatgaaaaatacacaaacgaaaattgctcactatttgcgccaatttgaggttaaaaattgttttgcgctttctgggacaccgattgaaaataaattattggaaatctggtcaattttccaaattgttttgccaggattattgccagataaaaaacgtttcctcaaaatggaagctaagcaagtggcgcgttttattaagccatttatcatgcgtcgccgtaaggaagaagttcttccagaattgccagatttgatagaaattaattatcctaatgagcttgaccataagcaaaaagcgatttatttagcacagcttcgacaaatgcaagaaacgattgcaggagcatctgatgctgatattaatcgccgtaagattgagattctatcaggaattacccgcttgcgccaaatttgtgacacgccaagtctctttatggattacaatggagaaagtggcaaactagacagccttcgcactcttttgacacaaatcaaggaaaatggacaccgtgctcttatcttttcacaatttagagggatgcttgatattgcggaaaaagaaatggaaaagcttggcttaacttcctataagattacggggtcaacaccagctaatgcccgtcaagaaatgacacgagcatttaataatggctcaaaagataccttcttaatttctttgaaagcaggtggtgtaggacttaacttgactggtgccgataccgttatcttgattgacctttggtggaatccagctgttgaaatgcaagccattagccgcgcccaccgtattggccaaaaagaaaatgtcgaagtttatcgtttgattacacgcggaaccattgaagaaaaaattctagaaatgcaagaaagcaagaaaaatcttgtaacaacggtacttgacggcaatgaaacacgtgctagcatgaccattgaagatattaaagaaattttaggtgtcgattaatcatcttaacgtcagtttttcagcgatgaaagactgactttcttttatgaaaactttgaaaaaatacctgaattagtttataataaaaatgctacaaagttggggcttgatttgagctaatttcggcttctcagtctattttgagacgatattagcgatagaagcttttagttactaggacgtaggtcatggtagtgactatttaccttgatttcttagtgagtgatgataattaattagcacagtgcgttaagaaaggaagtgacgctgtgagtaaaactgtaagacgctttcccttagttgctgatggtgagccagtaagtaatccaccaaaagcaatggctttatacgaaaacgaagatttaattaccaatattcatggaacttatcatgaaaaggactacgacgacgttactagagactataattttgttggcaagacagaaaacgatgcagagcgcataaaaacagttagcgaaggtaaatcttatgcggaattagcgcgtgatgaagcaagacgagatattaagaaaaaacgtcaagcttacctatctaacgacgttaaaaagatgccgtcaaaagcaacttttcagcaacaattaaaggcgacgctgcctaaagctcctgctaaaccgactaataaacttagtcatttaacagaaaaaatgcatcaagaggactatatcttggcagagattcccgtaacgtataaagagccagataattcttctgtaccaaaaccaaagaaaaataactatgatttcttgaaacgtagccaaatttacaataaggaagctcaacaaagccaaagagagcacaaagttgctcaagagttaaatttgacacgctttgatgacgctaattaaactgcctagcagttattaatatagaggagaaaaaatgtctaaaacctatcattttatcggaattaaagggtctggtatgagtgcccttgccttaatgttgcaccaaatgggacataaggttcaagggagtgacgttagtaaatattactttacacaacgtggtttagaacaagcaggcattaaaatcttgccattttctgaagacaatatcacatcagacgttgaattaattgccggtaatgctttccgtgaagataataatgttgaaattgcctatgccgttaataatggctttaaattcaaaagatatcacgaatttctaggtgacttcatgcgccaattcacaagttttggtgtcgcaggtgcacacggaaaaacatcaacaacaggtttattgtcacatgtattaaaaaatattacagatacctcttatttgattggtgatggtactggtcgtgggtcagctaacagcaactattttgtttttgagtctgatgagtaccaacgtcatttcatgccttatcacccagaatattctattattacaaatattgactttgaccaccctgattatttcaagagcattgacgatgtttttgatgcctttaatgattatgcaaaacaagttcaaaaagctttgttcttgtatggtgatgatgcttatcttcgtaaaatcacgtcagacgctgacatctactactatggattcaaagatacagatgactttgttgcctacgatattgttcgcacaacaaacggttctgctttcaaagtgaaacacggcgatgaagaacttggttcattccatcttccagcatttggtcgccacaatattttgaatgcgactgctgttgttgccaatctttatatcgctggtattgatatggaattggtagcagagcatatgaagacatttgcaggggttaaacgtcgtttcactgaaaaagtaattaataacacgactattatcgacgattttgcacaccatccaactgaaatcattgcgacacttgatgctgctcgccaaaaatatccaagcaaggaaattgtagcgattttccaaccacacacattcacacgtacaattgcccttttggatgaatttgcggatgctttgaaccaagcagattctgtttatttggcaccaatctacggttcagcacgtgaagttgaccacggtgacgttaaagtcgaagatttggctagtaaaatccaaaaatcagctaaggtgattagtcttgaaaatgtatcaccattacttgaccatgataatgctgtttatgttttcatgggggctggtgatatccaaatgtatgaacgttcttttgaagaattgttagcaaacttggctaataatacgcaataaaaaactgtggtgaaaaggagcaaagagctctttttcttttgaaggtgattctatgatgataaggaatgtatgtcttgaggatttgcaagatattatagatattgaacgcgagaatttctctgcagaagaagcagcaagcctaaacgatatgaaggaacgcattctgactattccagatacttttttagtagctgagattgacggaaagatttgtggctatgttgaaggacctgccatttgtcaacgctatttaacagatgatttattccatcaggttgtttcaaatccagctaacggcggatttatcgcagtcacaagtctttcggtagctccagattttaaaggacaaggcattggaatggctttactagcgacaatgaaagatttagcaattgctcaaaaacggacagggattacacttacttgtcatgaaaatttaatttcttactatgaaagaaatggtttcagtgatgaaggtgaatcagaatctacccatggtggctctagttggtataacatggtttgggaatcaccaatgattgagtgatgacattattaagaatagataacaaaccaccccgtcagttgattttacgctgtttttaggttataatggcgattgactaagattaggaggataagctttgaccgaatttaacgacgataagccaaaaactcaaaaagaaaaaagtttcaaggagcaaattttagctgagctagaagaagccaaccgtttgcgtaagcaacacgatttagaacttcagcagaaagaaaaagaggcagaagaatttgcgcgtaagacagcagaattgatggcagaatacgaagccgaggagcgaaaagagcgccaagaggcggaaattcgtgaagaaaagcgtcgccttgaagaaaaagctcaaacagctcttgctgaaaaccaaattgaaacgacggtagatgacaaagagattaatgatgttttgagaaatattaatcaaactttcaatcccaacggttcagattcagaggataatgctgaaaacgaacaagaaagttatcttgtccgagcaacagatggtgtcggctttgctggtattccagatattcctgacgacattacaagcgatgattctcaagttgctgattctgatatgcaagctgaagaaagcgctgcgaatagctcagcagagactaatacagacttggagaaaaacgtgggaacaaaacgcaaaagaaaacgccaaaaaacagatagtttggcacgacgcattgccttgttcttgataacagctattattattgctttgttagcaactggattttttgtttatcgctatgttgatagcgctgtcggagcacttgatagcacatcaacagagtacgttaccgttgaaattccagaaggttcggggaacaaatatatcggacaaattctagaaaaagctggcgttatcaagagcgcaacggtctttaattactatacaaagttcaaaaattatagtaatttccaaagtggctactataacctacaagctagtatggatttagaggaaatctgtaagctccttaaacaaggtggaacagcagagccagaagaaccttctctaggaaaaattctggtgacagaaggttataccattaaacaaatttcagaagctgttacgaaaaatacagcggatgatgattcatcaacacctttcacagcagatgactttttgtcagttgttcaagatgaatcattcatttcaaaaatggttgaaaaatatccgaaattattagcgaatttaccaagtgcagatgaggcgacgtatcaattagaaggttaccttttcccagctacttatagttactatgaagatacaaccatggaagatttggttgagcaaatgatttcaacaatggattcgtacatgtccagttactatgatacgatttctgaaaaaggcatgactgtcaatgaagtgcttacgctagcctcattggttgaaaaagaaggttcaacagatgatgaccgtcgcaatattgcaagtgtcttttataaccgtttaaatgctaatatggctcttcaaagtaatattgctattttgtacgctatgggcaaacttggtgaagaaacgacattatcggcggatgcaagtattgacacatccattgattcaccgtataatgtttataccaatactggtttgatgcctggtccagttgatagtccaagcttatcagctattgaggcgactgttaatccagcttcaacagattactactattttgtagctgatgtgaatacaggaactgtttattacgcagaaacctacgaagatcacgaagcaaatgttgaaaaatatgttaatagtcaattagatgaataataaatactgacaaacatggtgtggttcacatcatgtttgtatttgtagattatccaaataaatttttagaaaagagatagaaaatggcagaaaaaacttatccaatgacccttgctgaaaaagaacaactcgaacaagaattagaagaattaaaattagttcgtcgtccagaagttgttgaacgtattaaaatcgcacgttcatatggtgacctttctgaaaactcagaatacgatgctgctaaagacgaacaagctttcgttgaaggacaaatccaaatcttagaaactaaaattcgctatgctgaaatcattgacagcgatgctgttgccaaagatgaagtagcgattggtaaaactgttactgttgaagaggttggtacaactgataaagacgtttaccatatcgttggtgcagctggtgctgatattttctcaggacgtatttctaatgaaagcccaattgcgcaagctttaatcggtaaaaaaacaggcgacatcgttactatcgaatcacctgcaggaagctacgacgttaaaatcgttagtgttgaaaaaacagcttaataaatcaaaagccccacagagggctttttcttaatgttaaaaattaaaaaggaacaggaagtttattacttcctgttccttttggtttaattatttacgtttacgttgtttaccggcgttgcggttgcttttcttaggtttgttgctaagttgtgcgttgttagcagctggcgttacgtctttacgagcttttgacttgtaagtttttggtggatttttttcaaattcaacagcaattttcttacgaagtcttggtttaatgatgaacatagtaatcaattgttggatgattgagaagaaaccaccgactaaccaataaaggagaacacttgctggcatgctcataccgaagaataccatcataagtggcataacgtacatcgtacctttcatagcagcacgttgttcttcagcgacaccttgcatagacaaccatgattggaagaagtacaagacggcgataacagctgtcagagggatactacgtgtaccaaggtcgattcctaagaaagtactttcagagacaccttgtgtgtattgcgcagcgaaatacattgctgagaagaatggcatttggacgagaagtgggagacatcccataccaccaagcatattgatgccattttctttttgggcagccatcaattctgtttgcgcagctaatttttcttcttgtgttgttgcattacgcatacgctcattgattggttcaaagattggtttaaggtaagccatcttttcagattgatagcttgctttccaagattggtaaagtccgagcggtagaataatacaacgaacaataatagttactaagataatggctaaaccaaagccaagtccaacattattagcaaaatattggataagttttgccattggttcaccaagaatgtgccagatagtaccagtaggattaccacttgaatcacgactgacacaaccagttagtaagaacaataatgataagctgagtcctgaaaagaggacacgatttagtttctttttcaatagattatttccttttattataataccctactattttactgttttttgggtaatttctcaatacatctgtggtcttatttttttgtgtattagttggcaatgcgaaaatcagtgaaatcttcgaaattagcaattttaacatcaacataggtaacctttgaccattgtgaaggacctttgcgaatttcttggatgaatttagctattttagctgagtcctcggattgagcgagaatttctacggtgccatcgtcattattccaaacgcgaccataaatatccccgagttcaagggctagggcataagttgagtaacggaatccgacaccttgaacacgccctgagacaattaagcgtacttttttcatctcactttcctccttttatatgctataatcttcttatgactattataacctcaaaatcgaataatctcattaaaaagactaaaaaattattgaaaaaaaagtatcgtgaccattcttatctaattgaaggttggcatctttttgaagaagcggaaaaagcaggggcagaatttttaaatatttttgttcttgaggactatgctgaccgcgtcagccatttttcaatggtaacgtatgtaacgcctgaggttttaaaagaattaacagattctaaaacaccgcagggtatcattgctgaggttgctatgccgagcttgcctttagcggatttaaaagcagggcgatatttggtattggaagatgttcaagacccagggaatgtgggaacaatgattcgtacggcagatgctgctggtttggacggtgttttgatttcagaaaaatcagctgatatttacaatcaaaaaacactacgttccatgcaggggagtcattttcatttaccgatttggcgtactgatgtgtatgaggcttgtcagaagttacaaaatcttgatgtaccgctgattgccacaacgctttctaaagagtctgtggattacaagaccgttgagcataatggcgattttgcgcttgtcatgggaaatgaaggaaatggtatttcagagttaatgacaaagcaagctgatattttggcacatattattatgcctgggcaagcagaaagtttaaatgttgctgtggcgacaggaattgtcctttttcagttgatttaatttgaaaaatgtggtgcaagaaaagtaatttttgagaacttgttttcagtctaatttaaggtcatatgctataattagggtgaaagaaggtggttctgtatggaagcatataaaaaagataaagaatttatggagcttgttggtcatcttatccaacaccctcgttttcaaaaattagataatattccacagcatcactattcgacgcgtatggaacattctattaatgtggcttatacaagctacaagattgccaaaaaatttggttgggatgaaaaatccacggcgcgtggaggacttttacacgatttcttttattacgattggcgagaaacgaaatttaataaaggtcatgcttgggtacatccgagaattgctgtgcgcaatgccagaaaattgactacactaaataaacgtgaggaagatattatcttgaaacatatgtggggagcaacgattgctccgccgcgttataaagaaggttatatcgtgacaatggtggataaatattgggctgtcaaagaagccattaccccatttcgtaatcgttttaataagagaagacgttacagtcgtaaaattttacctagtaatcatcgctagaatagattgagtttagaaggattttctgatagtaagaaaggagatttcatgaatcataacgatgttatttacacacagacagatagtgcactgaatcgtttctttgctaagatttacggtttggtcggcgttggaatcgggttatcagctttggtatcatttttgatgctatatgtgtttactgataatatggttaatattattgtttaccatccatttgtttattacggtgttatctttttagagcttgctttggttttcttagctagtaatgctgctcgtaaaaatacgcctgctgcgttgccgttatttctattttattcggcattaaatggctttacgcttagttttgttattgtggcatacacgcaaacaacggttgttcaagcctttgtttcatcagctttagtctttggtgttatggctattatcggaacttttgttaaaagagatttgtctggaatggctaaggcacttatggcagcattgattggtatcattattgctagcttggtcaatatgtttattggttcaggcacaatgagttatatcattagtatcatttcagttttgattttctctggtttgattgcttatgataatcaaatgattaaacgtgtttatgagagcactggtggtaatgttggtgacggctgggcaatttcaatggcattaagtctttaccttgattttattaacttgttcttgagtttacttcgtatttttggaagtgacgattaatgtgatgaaaaagagctggtacagttaaatctgtatcggcttcttttatttttaggggatttccattggtgattttggcgctttgtgttataatagtcctaatattttgaaaattcgagggataaatatgaaaacaccttttatttcagctgaagagctccaaaaaattactgatgcatttccaacgccatttcacctttatgatgaaaagggtattcgtgaaaaagctcgcgccttaaacaaagcttttgcttggaataaggggttcaaggagtattttgcggttaaggcaacaccgacacctgcgattttgaagattcttcaagaggaaaattgtggtgtggattgtgcgacagaagtggaattattgatgagtcacaagcttggttttaccgatattatgttttcatcgaacgatactcctgcgcgtgaatttagatatgctaaagaaatcggagcaacgattaatcttgatgcttatgaacatattgctttcttgaaagaagtggctgggcttcctgaaaccgtttcgcttcgttacaatccaggaggtgtttttgctcttggaacagatattatggataaccccgaagaatctaaatttgggatgactaaagcccaattgattcaagggttcaaagatttgaaggcagaaggcgtcaaaaactttggtattcattcatttcttgcttcaaatacagtcacaaatgattactatcctgaattggcgcgtcaattatttgaattggcagttgaggttaaagaaaaaacaggtgtggctgtcagctttatcaatttgtctggtggtgttggggtcaactatcgtcccgaacaagaaccaaatgacattgctgtgattggtaaaggcgttcaccgtgtctttgatgaggtattgattccagctggacttggtgatgtcaaaatcttcaccgaacttggtcgctttatgttggcaccgcatggtttacttgtaaccaaagttcgtcatcgtaaacaaacttatcgaacttatattggggttgatgcgtcagcggttaacttgatgcgacctgccatgtatgatgcttatcatcatatcactaacgtgtctaatcctaatggcaaacttgaagtggttgacgttgtcggctcactttgtgaaaacaatgataaatttgcgaaacagcgtgaattgccagaagcgcgtgttggtgatacgcttgtgattcatgatactggtgcgcatggtttttcaatggggtatcagtacaatggtcgcctacgctcggctgaaatcctttatcaagaagacggtagtgctcgcttaatccgccgtgcagaaataccagaagattacttcgcaactatcaaaggatttgattttgataactaaataacaccataaagcactcgcttgtgcaatcaaagtatcgattgacataaagcgggtgttttttagttaaaaagagttacaattcatttgataaaaaccattcaagaatttgtaaactctttctatttctgctataatgggtgttgtagaaaaacttaggagaaaaatattcatgacaacatttctttggattttgttagttttggttgcccttcttggtggccttgttggcggcgtttttattgctcgtaaacagtttgaaaaggaaattggtgaacacccacgtttgacgcctgatgcgatccgtgaaatgatgagccaaatgggtcaaaaacctagcgaagctaagattcaacaaacttatcgtaacattatcaaacaatcaaaagcagctgcagcaaaagctaaaaaataatctttaagctttggtttgaaaaaataattgtcaattgctgtgattggtgtcgttgatattccaaaaagtcagtcttttggctaagattttcgagcacagagctcagaaatgaatgactcagttggctcaccaactgagttttttctaagtccatgattagaaagaagattctatggataatagaccaattggttttttagattctggagttggtggattaacagttgtacgtgagttaatgcgtcagctgccacatgaagaaattgtatatattggagattcggctagagcgccgtacggtcctagacctgctgaacagattcgcgagtacacttgggaattggttaattttctcttgacacaaaatgttaagatgattgtatttgcttgcaataccgcaacagcagtcgcttgggaagaagttaaggaaaaactggatattcctgttttgggagttattttgccaggttctagcgcagccattaaatcaactcgtaatggaaaaatcggtgtgattggaacgccgatgacaatcaagtcggatatttatcatcaaaaaataaaatcattggcaccgcaaatgaacgttacaagcctctcttgtcctaaatttgctcctcttgtagaatctaacgaaatgacatcaagtgttgctaaaaaagttgtttatgaaacgttagcaccgcttgttggtaaagtcgatacattagtgctcggatgtacacactatcctttgcttcgtccgattattcaaaacgtaatgggaccgaatgtcaaacttattgatagtggggctgaatgtattcgtgatgtatcggttttgttaaattactttgaaattaatcgcagtcgtacacaagatgacgtgactcatgcgttttacacaacagcaagtagccagagtttcaaagaaattgctgtgaattggcttgctaaagatattgatgtgcaacacgttgatttgaaaaagctgaacaaatagaaataggactgtaataaatgactgataaaatttatgagtataaagatgcggaaaattggtttcttggtgaatggggcggatttaatgccatttcaggtttaggaaatgtttgcgatgatgccgtgtatgaattaagtcaacaactggctaaattgaacacaagcaagtgttgtggcaattgccacggagattgtcattccgatgatagaaatggttataatgtgactgttgtgaaaaaatcatcagattttcaattgattcgttttgtcgctgatatgattaatcaagaaacaaatcgcaagcttgaagtgacacaacgtgcgggagcagtgattgttacggaagctgaacaattgctcttggttcatttgccagaaaacggtgttgaagcagcggctttctttggacaaacttctgaaactgcctttggtgatacgattttgattgcaacacgtaatgaaggcaagaccaaagaattccgtaagatgtttgaaaaaatcggtatcaaggttgaaaatcttaatgattatcctgatttaccagaagttgaagaaactggcatgacttttgaggaaaatgcacgtttgaaagctgaaaccatttcaaaattgacagggaaaatggtcttggcagatgattcaggattgaaagttgatgctcttggtggacttcctggggtttggtcagctcgtttttctggaccagatgcgacagatgaatcaaataatgccaaattacttcatgagttggctatggtatttgatcataaagaccgttctgcacagttccatactactttggtggttgcagcaccagacaaagacagtttagttgttgaagctgactggccaggatacattgcaatggaagcaaaaggcgataacggctttggctatgacccattgtttatggtcggtgaaactggacgtcacgcagctgaattaactgctgaagaaaaaaatgatatttcgcacagaggattggctgttaagaaattaatggaggcattcccagtatggcaaacaaaacaataattgtaatgagtgactctcatggcgaccgtgagattatcaatgatattaagacaaaataccaaggggaagtagatgctattttccacaatggtgattctgaattgccaagttcggacacgatttgggaaggtatcaaggtggttcgtggcaactgcgattatgacaatggttatcctgaaagattaattacttatctcggtgatgttgttgtggcacaaacacatggtcatctttataatattaattttacgtgggatagattggatttatttgcccaagaagcggatgctgatatttgcctttatggtcatctacatcgtccagcagcttggcgcaatggcaaaacaatctttatcaatccaggtagtgttttacaaccacgtggtgatgtgaaagaaaaactctatgccaaagttgacattattgatgataagattaaggtaaattattacacacgtaatcacgaccttttccctgcactttctaaggaatttgacagatgatagcaaaagaatttgaagagtttcttctcagtcatttggaacattatttgattccagcagaggatttagctatttttattgatactcataattctgaccatgccatgcttttattagctaacaatggttattcgcgtgttccagttattaccaaagataaaaaatatgttggaaccattagtattgcggatattatgtcttatcaagctaaaaatcagctgacagactgggaactagctcaaacagatattggtaaaatggtaaatactaaaatggaaacgattagtgaaacgtcgaatttgacggatattatgcaccttttggtagattatccatttttacctgttttagataaaaatgaccagtttttgggcattatcactcgtaaatcgattctaaaggcggtgaatagccttttacacgatttcactgattattacacgattactccgaaagatgattgattttatccaagattttattgatagcaagcccttatctgaaaatacaaagaatgcctatttttacgatttgcaacaattcgttgaagctattgatggcaaagttagcaaagaaaagctggcattgtatgaacactctttgtcacctttaaaagcttcggctaaaaaacgaaaaatttcagcggtcaatcagtttctgtatttcttatacgaaacagaccgactggaccatttttacaagttgagtaataaagagaaaataacaacaaaatcagttgaactggcgcttttggattatcgttctttttatcaggaaacgaattgtcaaacagggcagctaattgcgcttttgatgattgagcttggtttatcaccaagtgacattcaacagttaaaagttgctgattttgatttgacttttgctgttttgcgcgtgcaaagagcaggtttagtgagggttttagagcttcctgaaaaattattgccttatgtggcagcaagttcttcagagaatcagctttatctttttgacaatcaagggaaaccttattcacgtcaatggtttttcaatcaactaaaatcatttttagcaaccttggatttagattacttatctgcgcaggcaattcgccagcaatacattttgcatcaaaaagcagcaggtaaatcaatattggaggttagtcgtaatctgggccttaaaagtccagtgactttagagaaattttataaataatggatattaagttaaaagattttgaagggcctctagatttgcttttgcacttggtttcaaaataccaaatggatatttatgatgtgccaattgtagaagttattgagcaatatttggcttatatttcaaccttgcaagccatgaaattggaagtggctggtgaatatatggttatggcaagtcagctgatgttgattaaaagccgtaagcttttgccaaaagttgtcgaggcagagccagaagaaaatgaccctgaacaagaattgctgacccaaattgaggaatatcgccgctttaaagcgattagtgaggagctgtcagcgcagcacgacgaacgtgctaaattctattcaaaaccaaagcaagaattaatttttgaagatgctgtgttaacacacgataagacggtcatggatttgttcttatcgttttcgcatgtcatggctgaaaaacaaaaagaattaaaaaatagcaatacagttatcgaacgtgatgattatcgcattgaggacatgatgacaatcattgtggaacgtcttaatgcgacaaaaaaactagtgttgacaaccgtttttcgtgaatgccagacacttcctgaaatgattaccatttttttggcaattttggaattaatcaaagttcacgaagttgaggttgaacaagaagaaaattttggtgacattgttttacgaagtgttagctaagctgtcaaatcttgtagaaggcatttagcaaaagaggattaagaaaggaagttacatgaactatttagctcagattgaagccctcctttttgtggcaggtgaagagggattgagcttgcgacatttggctagtatggttaatttaacaccgacagctctccaacaacaattggaaaaattagcccaaaaatatgaaacagatgagacatcaagtctctgtctgattgaaaccgcaggtaattataaaattgtaacgaaggaaatctttgctgacttactacgagagtttgctaaggcacctgtcaaccaaagtttatcacgtgcgagtttagaagttctatctattattgcttataagcaacctattacacgtattgaagttgatgatattcgtggggtgaattcaagcagcgctattagcaaactaatggctttgggactgattacagaagcagggaaaaaagaagttattggtcgtccaaatctatatgcgacaactgattatttcttagatttcatgggcattaacgacttgagtgaattaatcgacgtttccaatattgagttggtcgatgaggaaatgaccctttttgataattctggcttgcctgaagaaggttagacagtcgctaagaataacgaaatactgtaaaataaccataaaatcgattggtattttatagcatgtagtaaaggaaagagaatgagaattaataaatatattgcccatgcgggagttgctagtcgtcgaaaagctgaggagcttatcaaaaaaggcttggtaacgattaatggtaaggtggttacagaactagcaacaacggtcaaatctggcgatgttgttgaggttgagggctcaccgatttataatgaggaaaaggtttattatcttcttaataagcctcgtggtgttatttcaagtgtttcagatgaaaaaggtcgtaaaacagttgttgatttgctgccaaatgttaccgaacgcatttatcctgttggacgtttggactgggatacaactgggcttttgattttgactaatgatggtgattttacagatgaaatgattcacccacgtaatgaaattgacaaagtctatttggcgcgtgttaaaggcattgcaacgaaggaaaacttgcgcccattgacacgtggtgtggtgatcgatggtaaaaagacaaaaccagcacgctacaatattgtcaaagttgaccctgaaaaaaatcgttcagtcgttgagttaactatccacgaaggacgcaatcaccaagtcaagaaaatgtttgaatctgttggacttttggtggataaattgtctcgtacacagtttggaacgcttgatttggcaggacttcgtccaggcgaatcacgtcgtctcaacaaaaaggaaatcagtcaattgcataatctggctgtcaataaacaaaaatgatgaaaaaaagtcttattgctcttgtgaaatggtatcaaaaacggatttcacccatgtcaccgccgtcatgtcgctatcgcccaacgtgttctaattacatgattggcgcaattgaaaagcatggtttaaaaggtgttttaatgggaattgcacgtattctacgttgtcatccatttgtgacaggtggcgatgacccagttccagactattttacgcttcgacgcaataaagattttcgcacaaagaaagaggaaggctaaagctttcctcttttcgttatttaatattttgaccaagttcttggaatgaagagtagtaacattgggtaaatttctaaacgcccggcaatcatagcaaaagacatgattaattttgaaaatgggctaaagatagcaaatgtgtcactagtaccaagcattggtccgatattattgaaggttgaagcagcagcgctgacaacgaccataaagttattactatctaacgataagattaaaatgagtcccaccaacagtgtgatgtagagtgaaaaatacttcaagacaccacgttgcgtttctttgtcaagtggttgatgattgacatggagagtcataatgcgattagggtaaagcgttgataaaacttgatttcttgagattttggttaaaatcaatgctcgcataactttgagcccaccagctgttgaaccagcagagccaccgataaacatgagaataagcaggataacttgagaaaagagcggccagacggttaaatcagtaattccgaatcctgttgtcgtaatcacattagcaacttcaaatagtgcattttccaatcctttaccagcacttgcatatagcccaccaacattgagccaaataagcgccgtagcaatgacaatgatgccgatatatgttcttagttcttcatctttaaagaatgctttgaatttacgaaggagtaagaaataatacaagttgaagttgattccgaaaagaagaacagcaacagagacaatattggtaatgagtgagctgtcatagtgagcaatcgagtcgttataaactccaaagccaccagtaccagcacagcccatggctgtaacgatactatcatatattggcatgccggctatttttaaaataatagcaagtacaacgaacattgtcaggtaaataatgtataaaatctgtgccgtttcttttaatttggaaaccactttaccaaaaacaggtccagggacttcagctcgcatgacttcgaggtggctatttttactattttccataatggctagcgcgaaaacaagcactcccataccaccgattaagtgggcgaaacttcgccaaaaaagaagtgagtgcgttaagacgctgacatcaggtaaaatggttgctcccgttgttgtaaatcctgagctcatttcaaagaaggcatcgatgatgcttggaatttgcccagataagacaaaaggcagtgctccgaagaaagaccagagtatccaacaaagagcgacaatcaataacccttctttggtataaatgtggtaatttttaggcttgaaagcagaacccagcaaaccaagaataagaaggataccaattgtaatgccaatactgttgagcacacgtaatggctcactataaataatggcgaccaacattggtacaagtagaagcgccgcttcaattaagagtaattttgaaaggaggtaacgaaccatacttctattcataacttacctcgctaacaaatcataaatgcgtgtgatgtttttcaagaaggtaacaacgacaattttatcaccaacttgtaaaacatcttcacctgtaggatagattgtttttcctttgcggatgatggcagcaatcaaaatattatctctgaatttcaatgatgataggctcttaccagccattttattggattcacgaatttcaaattgcaaggattcaatgcgtccgttggcaatgtggtgcatggcatcaaggtttgaatcttgtgcattaacacgtccgcgaatgaagtgcatcatggtatcaacagcgatactttttggtgtgacaatacttgagaattgactggtatcaataatctcaagcaaacttgtacggttgactttggtaatatttttttgcactcccaaggtctcaaggaacattgaagtgataatattttcttcgtcaacccctgtcaaggtagcaacagcatcaaagttttcaacgctttcttccaataacacacttttggcagtaccatcaccttgaacaacatgtacatcaggaaactcttggctaaacagttcagcacgttcctgattgttttcaatcactttaagattgattcttgtatgttttaagatgttgaggagatagtatgcgattcgtcctgcgccgataatcatcagatttttaatgattttggttttgacaaagttgtggaagagaatcatttccacacgatttcctgtgacaaaaatcttatctcccgttttgagaacggcatcaccatctggaataatcagcttaccttggcgttcaatggcacagatgacaatattgccaaatttctttcggaattggctaagtgtcatttgacaaagcttactgccgtcagcaatcataaattccattaacatgacgcgaccgttgacaaagtgttctacggaaagtgcatttggaaaatcaactgagttggcaatgtagcgagctgttagcaactctggattgacaacaagtgaaaaaccaagaaagtctttatctttaaaataggcgttagagtattctggattgcgcacacgaacaacggtttctttagctcccatttttttagccaaaacagctgaaatcatattgacttcatctttggcagttagggcgataaagatatcacagttgctaacatctgcttgttcgagaattttaaaattggctccgttaccaacaatccccataatatcttgacgtttggtgatgttttttaaaacggattctttctcttcaattaagacaacatcgtgtttttcttcaacaagagagcgacaaagtgcggtaccaaccttacctccgccgacaacaattattttcattcttacctccgaaatgtatcacccctataatactcttttttttctaaaaatactagctatttaatcatttgtaaaccctttctttatagagttgctttcctatttaaaaagaatggttgagatagattctgtatttttgaaaaaattacagaaggtaacattgattgttaaaattatataacatttttacaaaatacttgctaaatgagaaggggagaattataataaaccgttatctaattttagggagaatttcaatgcttgaaaagttacgaaatgtttttattggtaatcccttggaatcagctggcgagactgacgaggatcatctgctatccaaatcacaagctttggccatgttgtccagcgatgccctttcatctattgcctatggtccagaacaagttatcttagttttgacaactatttctgcggcggcaatttggtggtctttaccaattggacttttggttttggtattgttagcaagcctaacgatttcttaccaacaagttatccatgcttaccctaaaggtggcggtgcctacatggtatctacggaaaatttatcaccaagtatgggattaattgcgggtggtagtttgttggttgactatatgttgacagtagctgtttcggtgtcatctggtgccgatgcgattacatcagcttttccagccattaaggaatttaatttagaaatttcgattgttctggttttagctttgatgtttatgaatttgcgtggtttgcgcgaatcggcaaaatctttgatgattccagtttatttgttcattgtaagtatcttattcttgattgcatatggtgcttttcaaattctgactgggcatttggcttatacggcaacagcacacattggtaaagtggttccaggagtgtctatcattcttttgctgagagcttttaccagcggttcagcttcacttactggtgttgaagctatttcaaatgcggtgccatttttcaagaaaccaaaagaaaaaaatgcagctggcacccttgccatcatgtcaatcattttaggtgccatgtttgcaggcatcactttcttgaactactggttgggcattttgccatcagcacatgtgactgtcttggcgcaaattgctcaaaaaatctttggcgattcagcaatcggaaatgcgcttttctatattttccagttgtcaacagctcttatcttagctgtggcagccaatactggcttttcagcctttccaatgttgtcttttaacatggctaaaaataaatacatgccacaccttttcatggaaaaaggagctcgtttaggctattctaatgggattattaccttggcagttggagcaattgttttgctttgtattttcaatggttcaacagaacgccttatcccactttatacaattggtgttttcattccatttgcgctttcacaaactggtatggtcattcactggaaacgcaaatttggcaaagggtatttgaaacattcagttgctaatattttaggagcaatcatttgttatctgattatcttgattttattgatttttagaatcggtgaaatctggccattcttcccaattatcgtggtcttgatgattctattttattcaattaagagccattataataatgttgccatgcagttgcgtttaacagatgatgtcaaaaatattcattacgatggcaatacggttttgattttggttgggaatatcacacaagcaagtattcgtgccattaattatgccaaaagtattggtcaaaccgttgttgctatgcacgtctcaacgttagaaacccgtgaaaaagatttggaaattgaacaagaattcaagacctatttcccagatgtaacgtttgtcaatatcgaatcaaactaccgtgatattgtgaaaccaacaatgtcatttgttcaaaaaatgaatcaggaagccaagaaaaacaaccacaccatgacagtgattattccaaaattcattccaaaacacagttggcaaaatgttcttcacaaccaaatgagcttgcgcttacgtgctcgcctacgctggtatgaagatattatcatcgcaacttattcctatcatttgaaaaaataaatacataaagccctgaatttcagggctgttttgaaaaaaattgaaatgaaaagtattgaaaccgttatttttaggaaaagaatcaaaaaatattgaaaaaacacgcaaaaacatcacaaaatcatgtcaaatgcgttgactttaggcattaaagtgttataataaatatcaagaattcgttaatttaaatcaaacctgttatgatttaagttaatgaatcgccgccaaccacattgtttgctgagcttgactccgagcagtgtggtttatttttatgtcgaaatgaaagggtaagttatgaatattgaagaacttgactatcacgaagaaccgaataaagcgatgaatcatattgttctttttcaaccacaaattccacaaaatacaggaaatattgccagaacttgcgctgcgacaaacgctcctttgcacattattcgtccaatgggattcccaattgatgaccgtaaaatgaaacgcgcggggttggattattgggacaaacttgatgtgacattctatgatagtttggatgaatttatggaaagatgtgatggtgaggttcatttgattagtaaatttgccaacaaagtgtattctgatgaaaattataacgacgggaagcaccattatttcctttttgggcgtgaagataaaggtttgccggaagaatttatgcgagctaatcctgaaaaagctcttcgcattccgatgaatgatgaacacgttcgtagcctaaacttatcaaatactgtttgtatgattgtttatgaagctcttcgtcagcaagcttttccgaatttagaattaagtcatacttacgcacacgataaattaaaataaatcatatgaaagcagtcaaaatggctgcttttttgataatagcaaggtttttgtgcgaaaaatattgcacgaatgctgtttttttgctattctagaattgtcttcagggcagggtgtaattcccgaccggcggtgttgcctcttgttgtctgccttttgcttttattcgtcgttgacttcccttgcctaaggtcagttgtgtctgcgggttgtcgcttagactaaaagcaaaagattaaacaacttagttagtttagaaaacgaacgagagtaatttaaagtccgcgagctgcagggcagctgatctggtgcgattccagaaccgacagtatagtctggatgggagaagaccaagagtttggctatgctgtttttgttatgctaccacatactcgaacgccttctttcaatttgagaaaattggaggaacttttttatgcctgaaacaatgactaatacgcgtaaaatcgctcatgttgcgattttatcaacactttcttttttgctgatgtatcttcagtttccactgattccgtcagctagttttttacagtttgatttttcagttttgcctgttttagttgggcttgtgatgtttgatttgaagagtgctttgggaattttaattcttcgtactctgctaaagcttttgctaaataacggtggtatttcaacgattattggtttgccaatgaatgtcgttgctctaggtgtttttgtagtagcgctagctattctttggaaccaaaaaccaagcttgaaaaattacctactggcatcagtcgtgggaacgcttggcttaaccgtggcaatgtttgtgcttaattatgtttacgctgtgccactttatgccaaatttgcgaattttgatatttctgctattttaggtttgggaaactatctctttgccatggtcattccatttaacctaattgaagggattatcttttcggtgacattctttattttatatagttgccttaaaccaattttaaaaatagattaagttgaaaaaggctgagacaaaagtactcagcttctttatttatatagttattatttacaaggtgcagtagttgagtgggttctaatgcgctgataaatcagcttttacaacccatttgacatcaagctgcgcttgacttcatttccaacctcaaaaggttccccaaaccttttgagccatgcgggggtgggttataaaggttcggggaacctttataatcgggaaataaaacttacgaagtaagtgtcaaaaacagttcactgaactgttttaggtcagcaacaagaaattaagacttgctgagaaatcaagtttctacgaaactaccgattcgctttttaatttctaggctcatgaataaaatctccactggagattttatttgtcccactcccttgctttacgcttaaaaatggtatagtttaagtgagttttaattggagtgagggaaaatagatgtgggttttatttgcgattttatcggcggtatttgctgcgttaacgtctatcttagctaaattgggataagtggtgtcaattcaaatttagcgacagctatcagaacagttgtcgtggtttttatggcttggggaatgggaatagtctttatcacaaatgctcagagtggtattggtgatattagccgaaaaagttggttgtttttgatattgtctgggcttgctacgggtgcttcttggttattttattatcgcgctttacaaatgggcgacgcttcaaaagtagcttcgatagataaattaagtgttgtcatcaccttgattttagccttcatttttctaaatgaacagctaactttaaagtcaatactcgggtgtttgctgattgtggttggaagccttttgatgattttgtaaactgtttagaatgataaattcctacaattttgccacagatttttcgaggatttatctgggatttgaaaactaactaaggtataatagacttatgacattttgatagaaaaggtattgtaatatgaaacataaacaaaattatcttgtaggagcttcattttttcttgtcatttttatgatgttaggctatttggttaaattctttcctgagactttggctggaattgactcaaacattcaaacaagtgttcgtggcgatcttcctgccaatgcaacagctttctttaaaatcgtaacgaattttggacatgaagtttttatctttgtttatgtctttgccattgcttttgtattttatttctggaaaaagtggaaagcagaagctattttgctagctgggaatttagtgttaatgggcattttttcaacaggttttaaatacctttataatcgtccgcgtccaagtattcagtacctcattccaaagccaatgggaccgtcatttccgagttggcatgctgcggcgaccatggttgttgctttgagcttggttgtgattatggaacaacacttaaccaagacgacagtcaaacgttgcttacaagttttagttgtggttatcgctttgacaacagcactttcaagaatttatttaggggttcattatccgtctgacattttgggaggttggttactagcatttgctatcgcagccgcaacctatccattttatgataaaaaacgctttgaatggcgtttccaaggaaaacaagagtgagaaggcaatgaagccttctttttttattactacaataaaacgttttcattactttgttaattcaaatcttattgacaattaatttgaggtggtataaactaattttaaaaagtgagagatgtctcactttttaaaattaggaggtaacaatagctgatgcaagttatgcttaatgattatgttaatgaaagacataaatatagattacaatcagttcctgaaatgatggctttgggtgcttattttggggaaggtgcagataaatatagcatgaatttaccattttcaattgagttgaaaggtgaattagacataaaattattggaattttctatcaataaagttattgaagaatacgatattttacatagttctcttgaatttgatgaggaaagagtcgttgtagcggtagcttcagattatcattttgaattatcttgtgaggatatcaaaggaaatagccaagaggaaaagcttcagtatttgagaaagtacctgcaagaaaaaagcgctacggatatggatctttttaatgccacaaaagctccttttgacattgaattattcaaaatcagtgaagattatcatattttgtatttgatgattcatcattctatttgtgatttcggaagtgtggtgatgctattctcagcgatttttgaccgttataatcagcactcaacagctacatcaacaaaaacatatgaggatttcttattagaagaaatcagtatcgtgggcacagatttggaaaaagaagaggatgaatactgggaaaatgaacttaaagggattactctggatatattgtctgaaaattcagaacaaaccaaagaaacaacaggtgacaatctcggttacattataaatggaagtcaaattgatgaagtttctagaaagaatcgaacaagttcgtttaatactgcgatgctcatcatccaaatggcgattgcaaaagtcaatcatcataaaaatagttttgttcagtatgccattgcgaatcgttcagaagaaaagtaccgtcaaacgattggctgtatcacacgtattattagtaatacgatgatttttgaagatgatgatacggttttaacgttaagccaaaagatgcgtcgaaaaatcggaaatggctatattaatcgccatgtggcttataaagtccaatttggttcggtaccttacgtcattgcgagcgaggatatggaaagtttaggaaaatttccaacctttaatgggcaaccattgcagtttgatttcattgatatcgaaagacgcatggatattattgctttcttgattttaccagtaccaaacggcatggcaatacaattattaggtgattgtgaaagatattctgaacacatggagcagcttctggcagctataaaagaagctagtgaattcatattatcgaattctcctaaaacatttttggagtactgggatagtaacgcaaaacaatcagaggttgaagaaactattactataattcagttatagtacgttaattttagaaattataggaaaagatttagatgagatataacgatgttgctgtaatcggaatgagcgttaaatatgctaaggttaacaatttagaagattatcatgatttattattaaatggaaaatctggcattgatttgccgtcgaaagaacggttaaatttcacggaacaatcaccacaagaaaaatacatgagagctggttatgttgacgatattgataaattcgactatcagttctttgagatagaagagcatgaagcgcgattaaccagtccagagcagagaatttgtttagagctggttgcacaagctatttgggatgctggttatagtttggaagagtttgcgggaagtaactgtggcgtttatacggttagttcacaaagtcagtatcgaaaatttttgaaacgagcgacctcaacatccattattggtagcgagagctttatggtaagtgggaagatagggtactattttgatttacgtggggagaatattagccttgattcggggtgttcgtcgtctctagaagcacttcatcttgcctgtgaaagaatttctagcggagaaattgatacagctattgttgggggaatttcacttaatgtggaagtcccagtttcagggaaaaatgattatgacattttgggaatcatgtcgccagattataacatctattcatttgattcaagagggaatggaacggtatttggtgaaggaagtggctttgttttattaaagagaaaagaagcagctattaccgataatgaccatatctacggagtcattttaggtggaaaagtcaatggtgacggaaaacgtagcagtagtgcaactatgcctagtgtagaagcccaaaaagaagttgttattgatgcgtggaatgatattgaaaaaattgataaattaacagagattgaagggcatggtattggggctagtatcggtgatgctgttgaatgtcaaggtttaattgggtcactagaagataaaggtctcgaaaagaatcctattgttttaagtactgtaaagcctaatattggtcatctttttggcatgtctggaatgtcagctttggaaaaggtgcttttaggttatgaaaataatgtgacttatccaattgcaggttttgaaaaaattaacccagttatcgatttgtcatctgtcagtttagaacctgcaaaagaagctaagtattgggcaaaaacggatgctaggatgacagggattagcgcctttgggttgagtggttgtaatgttcatcttgttcttgaaaatttcaaatctcaagataagccaaattcatatcctcaaaatcagtacctgattaaattatcagcaaaaactaaggactcattatcggagttaaagcaaagattagctaagtttttacaaaaaaatgaagccgataattttgctgatgttgtttacacactaaacgttggacgtgatgactacgagcatagagaaactttttgggtatcaaataagggagaattcatcgaagaattgcttaaagaaaagcaggaaactccccaaaatccccatactaagcttgtgtttgctatcaaaaatgatttatcagagccatttcttgctactttgtgccaagctcttccacaaaatgatgttctttcacatggagctcaaacagagcaaagtgttttagaagagaaagttcttcttttgcaatatttacaaaaaattggcattgatgaaaagaccttttttcttgatgaggtcagcaataaacaaattcaattgttacaaggaaaatgctcaaaagcagagttagaagaagctaagaaagcaaataaagcagataatgattatgcgaaatacaagcaaaaattaaaagaattctcgcaaaaggaaaaattggttgtccttgatttttcaagcacgggagaattaaaagaaatcgcagatgagcgaatcacggtctttcaagtaactgatagtgatgacttggcgcaattcattgaatggtggtttacaagtggcaaaaaaatccattggagcaatctttatgataagagttgttaccatagagtttccttaccaacatatgcctttaacaatcaaagtgtttggttaagagaggtgaaagacgagaaaaataaagaagagttaacagttttcatctttaaagcggctgatatttcggttgattttaaagcatttccttatgctgatgaagaatttaaagagtgctttgaactgctaacggctaaaaatgacattaactacgctgttgcgatgtataggtatttaagaagaaaaggaattactcctcaatacattatcactgatagcttgggagcaaggttgatagattatttgaaaggtaagactagcttagaagaagtaagtcaatggagtgatgaagcctttagtctagataactcaaaagtagcaactaaaatcagcgacttattaacaaagcataaaaatatcagagtgattgatttctcagatgattttgactatccaagcgaaacaaacgatgtcattgttcaatctcctgcagaagttttcaaacagtcagaacaaagcgaagcaacaaaagacttgcaagagcctaatagtcaattaactcctcaaaaaacacaagcgatgattgatgccgaggcattcttagaaaaattgtggctgaaagtctttaattttgatggcgaaattggacaccaagaagatttttttgcgcttggcggaaattctttaatcatgcaatcaatgtcagatagtatcaatgagcattttaaaatgaagtttgacatttttgaaatctatgattatgaaacaattgaaaagctagcaagtaggattttacaaggggataattgatgacacagaatcttataaaatatatcaaagaaaacacagaaacggttaaaaataaggtagctatttttgacagaaaaggacagttaacttatggtgaattgatatcaaaagttcaaaaaatagcaggttacttcattacgattggcttgaaaaaaggcgaaattattgtattggaggctttatcagagatagattatgtcttggtatatcttgctgctcaacaacttggagctattacagcacctgtcgagagagggattcgagatgagttattaaatcatatttgtcacctgattaccccaaaatattttatttcaaatactggaaaacaaatagatgggattgaatgttatcagtataaagaagtgattgacaatgccttgtattgggataaagaatttgatgtagaaatcaatgacaacgatagaatagctgaaattatttttacgactggtacgacaggtaagccaaaagcaagtctgcatacggcagcaggagttttttacaatacgatgaatacggtcaatggtgtggggataaagcaaacagatacgcttttggtgccattaccgcttaatcattcctttggaatgcgtgttttaagagcttctcttgtacagaaagccacagttgtattacatagcggtgccatttttgcaaaatcacttattgaagctattgaaaactatcattgtacagcaatgtcttgtgtgtctgcaacaatggaatctgttttaaatgaaataggtgaagcaaagacaaaagaagccttttcgaatttaagatttattgaatttagtgctggagctgtaccgacacctttgcgaaaaaaattagtaacattgctttcggagactgacattctaaatacgtggggctcatcagaaacaggtggttgtttattcattaatttatcaaaaaatacatctaagattgagtcggctggtaaggctttaaacggtactgaattgggtatcttatcagaaacaggtaaatttctaacaggtacaggaaaaaatgtgacaggtagattagccattaagggagaaatgattttcaaagggtattacaaccaagatgatgaatctcgtgacactctaagaaatggctggttagtcacaaaagatatcgtttggcgagacgaagagggatattactacattctcggacgttcagatgacctcattaatattgggggtgaaaaagtttcacctgctgagattgaaaatgcggctcgagaaagtaaactaaccagagaaagtgcttgtattgctattgctgaccaagatggggtattaggacaagttcctttgttaatctacacaacagcagaaaatcaagtcatcaatgaaaaagatttagccaaaaagatttcagcacaaattggtgcttttcgtactccaagacagtttcttcatgtgcaaaccattccaaaaaattacatgaaaaagacaaattataaattgctaaaagaactttggacaagtggtggaagtgaagaaatattaggtacatttggagtagaaaatataatctcccagcatgattatgatttaaataatattgtcattgaaacaattctaaaccgaagaagtcgaagaagattcttagaggaatcgattcctgatgagattattaacaaactcgtggaacttggtacatcagcaccgtcagggaaaaatttacaaacacgccaatttacggttattagtaataaagctgaaatagaaagactaaaagaaatcactaaaacagtcgccaaacgtgaaggaacatcatttaatggctttgtgaatcctccgttgttgattctcatttccaatgatcgtaaaaataaagatggtattcaagatgttggcgttgctgcggaaaacattctcataggagcagaatctttaggaatggctggtgtgtggttgaatccgcttatggaaatttctgatgaggaagaaattcgtacacttttggatacttatcttattccgtctagtcacattgtttgggcagtaatggctattggctggccaaatgaagaaatcccacaatttactagaaaggctaatgttgttaattacattaattaatggggtgacagctgtggaaaagtggttatttcatgtaaaacctttagaaaatgttcagtacagattattttgtctcccttatgcaggtgcaggggcatcactattttcaacttggaaaaatttgagagaatctggcattgaagtctgtcctattcaactcccagggagagaaaatcgctttaacgagccttctcgaaataatatcaaaagcttggtaagtgatatttgtaccgtaatcgcagattatctggataagccgtttgccatttttgggcattctcttggtggcattattgcgtacgaattaacattggaagtttaccgaagatatcaaaaaaagccaaactttgttgttctttccgcttcttctatattcacaagaaaaaaagactatattgtgtcgcaattaagcgatgagaagttaatggattatttgaaatttattggcggaactccagagatattattgacctctcgatattttgagaaatattcacaggttatccgttcagattataaattattggaaaattaccgatttcaattgcaaaaactgccttgtaaactggtcgctttggcatcttcacaggataagctagttttattggaagatattgaaaaaatgaaatactttgcaagcgagttttcaatgatatccgtagaaggtacccacttttttatcaatcaattaacggatgaaatccagcaaatcattagcgaaaatttcgacagtagtaatagtaaaaaggatagtttatgaaaaaatataataccttacaagaagttgtgatggctttgaaagacaataatcagaaagggattacgattatcgatagaaatgataatcggcgaacaaaaacgtatagtgatttcttttcaagtgtattttgtcaagcggcattcttattacagcagggctatcaaaaaggggaaagagttgttgtattagtaagtgatgccttgaaagaactggaactcttttgggctttgataatgataggagctgttccgattccaattgttatctctgacttgacgcttgataatcaaaaagaagaaaaaattagaggcgctttaaaagcaacctcgccagatagaatgcttgtagatagtgtgactaaatattccttagaatctgtattaagcggtgatattcagcaatttcctgttgttcagattgtatcagatttagataaaacgctaactgattttgacaagccagaatttcaaacagttcagacagatgaccctgctatcattcttttgagttcaggaaccgtaggcgtgccgaagggaatcattctgactcataataacattttaagtgcggttgtaggcaatgttgattttcataactttacagaacaaacaactttcttaaattggatggtaatggagcatatggcttcagtatcactgtttcacattcttcctacggtgcttcaagctaatcaagtgcatgtggcgaccttgagagttttagaaaatgcgacaagacttccagaatacctatctgaatttcaagtgaatgcaacctttgctcctaattttgtttatgacttacttttgcaaaagagggaagaaattttgccattagacataactctttctagtgttacagcaattatcaacggtggcgaaaatattaattttgaacattgtgatgcctgtatgaatttattggcattaaaagggttaaatcctaaaagcatgataccagcttggggaatgacagagaccgcaagtggtgctctttattctaaagattttggtcgccatgttattaataatcatgtttcggtaggaaagccgacatcaacggtaaaggttaaattgcttgatgataataatcaagaaatcaccgaggacaatgtcgaaggcgaattgctagtaaagggtaagccgattttcagtggctacaccaataccgaattggaaggtcaaaattattttagagatggttggtttaagacaggtgaccgtgccattttcctaaatgaagaggtcgttattatggggcgtcaatcagacatttttattatgaatggtctcaatattaacacgcaggaattagaccaaaagttaaaaaatgagctaacatcgacgaatcattcaacaataaaatctgtgccttattttgaccagaagcgtcagcaagaagccttacttgtctttgttgaggaaacagcaaataaagaagaactttggaactatttagcaagtcagctgtcaattcctaattgtcaccttgttctagttccgcaaggcgaatttccattaacgtcgattggcaaaatccataccaaagcattaattaataactttgaacaggactgctatcaacgatttgaaaatagtcatcagcacttgcaaacaacaactttagctgatgataacatttccaaaatcagaaaaatctggtcaaaaattttagccattgacccagttttgatatcagctgatgataattttttccatttagggggaagttctgtgaatgttcctgaagttttaaatcaactgaaaaataaactaggcattcagctaaatgctgccgaatttgttcaacatgcaacgatagatgcgctactttctcatgtcaatcagcttgaagaaattcgagaagaagagaatgacattttaattttgtgatgttgtggataaggtggtggattcttgatttacctattagacaacatttcatacgatgatattgatttatcttttggattgaaattgctggaaaatgaccgtcttaaaaaggcaatgaaatataaatttcataaggacagagttaattctgttttagcatggtctttgctgaaatttggtttatttaatgaataccaaatggtaacagtaccagatacgatttgtaatggttatggaaaaccttatttttcgaatcaaaatctatttttcaacttatcgcatagtgattctgtcgttggttgcgcactaagtcgttttaatattggatttgatgttcaaactaatattaacaaccttggtgctatcaaatcagtctttaaccaaggtgagctaaataatatttgttgtcaacaatgtccgattattgaggcaactcgtttatggacactaaaagaagcttatggcaagtactacggaaatggactgaactataatttaaaacactttaatgcaagtacaatcagtaagaatagttggcagaattatgactatcaaaaagtcttttctagctctaaatcgacgtattcttactcggtattttctgaacaggaggaggcattctattatgtgacatgggatgaattaaaacatttttatcaacaacttttaaataatcaatgggaaaaggagaacacaaatgagttttattgagtttcaaaatgtcgttagacagtatggtgagggagaaagtttggtgactgcggttaatcacattaatttccaaattgaccgtggcgaatttgtagtgattttagggcaatctggtgctggaaaatcaaccgtattgaatttacttggtggaatggaccagccaacttctgggaagattacggtagatggtcgtttgatttcagagatgaatgaccaagaattatcggattacagagcgactgatattggtttcatttttcaattttacaatttactgccaatgttaacggcttacgaaaacattgctattacgaaagaaattgttgatgataccttaaatcctgatgagattttaaaattggtgggattagagcattgccgaaataaatttccagttcatttatctggtggggagcaacagcgcgtttcgattgcgagagccttatgtaaaaatcctaagtttttgcttggtgatgaaccaacgggtgccctcgattcacagacaggacaagaagtgctgacactcattcaaaatatgtgtcgaaattatggacgtaccacaattttggtaacacataacgaggatattgcacgttgtgccgataaggtcattaagatgaaaaatgggaaaatcataacaatcgaaaaaaatgataaccctgctttggtaagtgaggtggattggtaatgttatggaaaaaatttattagagatattaaacacaatattccacaatttatcactatctttctcatggcatttctcgcaatggtgctatatacgggattggcaagtgaggtgtatagcgtcaaaagtgccatgtcgtcttatcacaagcaaacccatttggctgatgaatggattattggtgagaattttgattctgctgatgtgataaaacttcaaaagattaatggtattgagactgttcagctccgccttcaacaaaaagatagtggtgaagacggaacggttgtttacatgaattttgaaaatagcgattcgcttagtcagcctttagtcgtagagggtgaggactatgacccaactgaccaagaagggatttggctgaatgctcgctttgcggctgaaaacaacatttcacttggtcaagattatcaaatcacgcataatgtttccttgaaaacctatgttgttaagggctttatttgggatgctgaatatgaatattacaaggatgatgtcgctatcgaaccagattatcaaacggtcggctatgcttatgcgtctattaattctttagatactgatgagcagaagtggaatcaagtgttattgagttggagtaatggtgagaaaaaaagcacattgcaaaaagtcaaaaaagtgctttctggaaaatacacaacgttttataaccactctggtttagccagccttgtaaacttgtctgccgaactagaccaacacgaaaccttgtcactatctttgccagctttctttatcattatttgtttgttgacgttgatgactacaatgaagcgaatcattgatcgtcaaagaacgcaaattgggactttgaaagcattgggaatgaaaaaatggaagatttatgttcattaccttagctatggtgggattatttcatttatcggtgccgtcatgggaatcatcattggaccacaattgttagctccaagcttatttaaaatgaagtttttctatgatacttctgatgaatacatgctgccgcattttggtttggtctatcctgccattttctggataatcggttttggcttggttcttctctgtgttattgtcacttggttaagttgccgtcaaattcttgccattcagcctgctcaatctttgagaccagcaccgccaaaatcagctaaggcaagctttattgaacaattagctatttggaaaaaacttagtttttcagttcggtataatatccgagacattattcgtaataaattcagaagtttgcttggttttgttggggtgatgctgtgtatggctttgctattatcagcttttgcctcaaaacaagatttttcaagctcggtgacagattggtatattagcaaattattgaataatgcgaatttcatcactcttagtgaatcggcgtcattaagcgaaaaagaagaggtggctagagcacttaatggtgaacttgttatgtcagatactgcggtgattcgtacgaatgatactgacgagacaagtgttcatattaacgtttatgaaaattctaccattgctaaggtcacagatatcaagcttaatgttcaaaccttgtctgatgatgattttacgattaccgaaaaaacagccaagcagcttcatttaagtgtgggagatacgattgaatggcacccttacggaaccgctcaatggcaaaaaaatacgattaccaagattgtccgttcgccactggaacaaggaatcacgacgacaaaaacggttttggaaaacaaccaatttgactttacgccaacaagattattaacaaagcaaaaagttacaaaatctttgaaaaaaacatataatattatcgaaagtattgaatcgtcttcagatattgtctcagctatgggaaattatctagaattgattaatctatttacagcctttatcattatacttgctgttttcttggcagttgtagtattatatagcatgggacttttaacatttgaagaacgacgaaacgaattggcgacacttaaagtcattggctttggaacaaagaaattgcgcacaatgttgttacaacaaaatttgattataaccattatcgcgattctttttggaattcccctaggaaaagtgattctagacgttttattaaattcactaggagattctatcgacattcctgcacaaatatcactaaccaacttgattttagctatgggaattacatttgttgtttcaattctagtcaatcttttatttacaaacaaaataagaaagttagatatggttgaagaatttaaaaaccgtgcctagtatttgatacgattgactttctaaaggagaatgaaaactttgaagcagatagaatcaacaccgcaaaagggattgcaaaagcgtgcccaaaaaacaaggcagaaaattattgatagtagttttcaattgttttctaccaaaggttatcaaaatgtaacggttgatgatattgcgaaaaatgctggtgtctcaactggggcagcttaccgctattttggaaataaaaaagaaattttacttgttttgttagaagatgtttttaacaataaacaattcatagctgaaatcaaagatataccaagttcgctgacaacttatcaagagtgtgttacgtggattcttgattgttttgttgaaattcatgaaaaatacgttggttttcatgaggaactagaagctcttcgtcatcttgaccaagatgttcaaaaactttatatgcaatgcgaagataaagaaattgattttctcttggcagctattgaaaaacggacaggtaagaaattgacacaaggcaaagatagagttcgcgtgatgttaaaatgcattgaggactattgtaatatgattatcgtcgaggacattatcgttggcgataaagagttcattaaacaaaaatgcatccaagcggcaacctctgtcttggaagtgaactaattgaaaatgagctggggtcatcccagcttttttatagctaagaatacgcttacgacaagtgataagagtttgtttgttttggggaaagtgttataatataagctatgaaaaagcgttataatactttaaatgattattatcgtcagatttttggggagaagatttttaaagttcctatcgatgcgggctttgattgtccaaatcgagatggtacggtcgcacatggtggctgtacattttgtaccgtatctggttcaggagatgcgattgttgctcctgatgcaccgattcgtgaccaattttacaaggaaattgatttcatgcaccgcaaatggccagatgttaagaaatatttggtttattttcaaaatttcacaaatacgcatgataccgtagatgtcattcgtgagcgttatgagcaagccattaatgaatctggggtggttggtatcaatattgggacgcgtccagactgcctgccagatgagacgattgcttatattgctgagctttctgatcgtatgcacgtaacggttgaacttggtttgcaaacaacttatgatgaaacatccaaaatcattaatcgcgcgcatacttatgacctttacgttgaaacggttaaacgcctgcgtcagttagcgccgaaagttgagattgtttcacatttgattaatggtctgcctggcgaaacgcatgacatgatgattgaaaatgtcagacgttgtgtgacagataataaaattgacgggattaagcttcatttattgcatttgatgacaagtacgaaaatgcaacgtgattaccatgaagggcgtttaaaattgctgggtatggaagaatatgttaatatcatctgtgaccaactggagattattcctaaacatatcattattcatcgtattacaggtgacgctccgcgcgatatgctcattggtccaatgtggagtcttaaaaagtgggaagtcttaaatgccattgatcaagaaatggaacgccgtggttcttatcaagggtgtaagctagaaaataaggaggtcgtgttatgataaaacgtcctttgcatttatctcatgattttttagctgaagttttggatgaacaagctattgcagttgatgcgaccatgggaaatggcaatgacacagcttttcttgcccagcatgctaaagaggtttatgcttttgatgtgcaagaacaagctttgcaaagcacgaaagaacgtttagaaaaacaagaaattcacaatgctcatttaattttggatgggcatcaacatattgaccattatgtgaatcaaccaattcgcgcagctattttcaatctagggtatttgccaagtgctgataaaacggttatcactaaacctgacacaaccctgattgctgtggagaaaattttagaaaagcttgaggttggtggtcgcttagctatcatgatttactatggacatgagggcggcgacatggaaaaagatgctgtgctagattatgttaatcagctagaccaaaggctttttactgccatgctgtatcaacctttaaaccaaattaatcaaccaccatttttagtgatgattgaaaaattaaaacagtcgaaagagagttaagcattatgcaaaccgtaacggttcgtgaaaaattacatcaaatgcatcaaaaatatttagatgacgcaaacactaaaccgtgtgccaagttgtcagaagaagatgcagagaaaatcttgacaattaagaaaaagttagccagtcttgaaaaagaacgttgcgtacgacttcgtgatcgtaaagatgttacggctattgatcaaaaaattgccaagcaaaaagaacgttttactgtttattgccgccaaaaacaacgataaggagtgatggtttatcgagagttctatccttgttatagcatttttattaatgctcattgtttccaacgtcattaatcgtctttatcctaaattgcctttaccttttatccaaattgttttgggaattttggtgggtgttttagcaaaagagacgacactcactttaaattcagagctatttctggctttggtaattgcaccgcttaattttagagaggggcaagaaagtgatgtgacgacctttgtcaaatacaagtcgattgtggcttatctgattttgccaactgttttgataacaatgctgacagttggttatgtgactggtaagttattgcctgttgatgtccccttggctgctagttttgccttgggagcagcgcttgctccgacagatgccgttgcgtttttatcaattgcaaaacggtttaaatttccaaagcgcgtcgaatccattttgacaatagaagggcttttgaatgatgccagcggtttgatttctttccaatttgctgtgacggctttgaccactggagccttttctttgcttactgcgagctttagtctgttttgggcaattattggtggaatgttggtcgggctattttttgccttgttaaatcgaggcgtcatggcttttcttgaaaaaattgatgtcgctgatgtgacaggggctctcttattggaattatcattgccgattgtgtcatactttgttgccagtctttttggcgtatcaggtatcattgcggtcgtgattgctggattatcacaagccagtcgtttcaaacgaattcgtttatttgatgctgaggtggaccgtgtcagccagattatttgggagacggtcagcttcatcttgaatggttttgtctttatcgtttttggctatgaattgacacgtatcgttgagcctgctttgaccaatcctttggttaataattatcgtcttgtggcgattgtgttaatcgtgacagctttgctctttttagttcgatttgtcatggttggactttattatattctgcattatcgtaaaggaaaacgttcaagtaaatcactattgagagaggttttgctgttaactttttctggtgtaaaagggacggtatcaatcgcgacaattttgctattgccacagtttgaaagttacgcttatagcttgattttatttaccgtagcagcggtgaccttgctaagttttctaattggagtatttgttttaccaaacttggcacaaagctctgatgatactgataccaccgattatgtcactcaaattgccattttaaatgaagtggttaagacattggagcaagatttaaaagaagtcgaggacaaaggtccactttatgcagccattgataattacaatgggcgtattgagcacttgattttggaacaagagccgactattgtcaaaaaagaattggcttacttgcgcttgatgattcttggaattgaaagcgatggtttagagcatgctttttcagaaggcaaaatagaattagttgaataccgtttgtatcaacgttacttgcaaaatttggaacgtcagattaatcgcggttttatttcaacgtttagttatttcttcacgattagcatgcgagtgattcgtcgcttagttcgtgaaagcttcagtttttggccaactatccgtcactttctttctggaaaatcacgcgaaatcaaattgacagaagataaccgtgaccgcttgacagagctttatttaagcaatacggagctggtgttagaagggttacaagatttggaaggcatttataattctgagctgattggctttcttcaaaggtcacgcctacaagaagctaatatcattgaatcgggcgtctttgttgaacgtgtcattgctcatatgaaacctgataatattgatgaaatgttgcgagggtattatcttgagcgcaaagtgattgccgaatatgaaatgcgtggtgacattacatcaagctatgcaaccttcctacgccgcaatgtcaataaactcgaaagttattcgttaaaagatgattacggaacactaccatataattactttattataaaatgacccctagaacgaaaatgtcctaggggttttactgttatgatttaaattcaggtttgatgtaaatgcgttcgtcgcctagtgggatgattgagacggtttggtcatagaaatcggttaagatgtcttcagtcaaaacatcatttttaggaccttgggcaatgatttctccttttttcagcaacaagacatgagtcattgattgtgtgatttcttcggcatggtgtgttacgtagagaattgttggagcattaggaaggcttgtgatttgctcaatctgtgtcaatagtttttcacgtgcaaacaaatcaagtccacttgtagcctcatctaaaatcaaaatttcaggattttccattaaactacgtgcgataaggagcagttgtttttcaccttgtgacagactagcataaatacgtccaagcagatgttcgccaccaattgaaatcagcatttgtcgtgcttcatcaagttctttttcaccgtattctttgtaaagaatgcttgatttgtatttcccagtcaaaacgattttttcagcaagcatattggctggaagtcgctcagcaataaatgagccaacgataccaattttggtacgaatatcgctaatatcagtaccaccaaatggtgttcctaagacttccacctcaccgtctgttttccaatattcagccatgataagctttaaaagcgttgtcttaccagaaccgttaagccctaaaatagcccaatgttcccctttgttaacttcccagttaagattttttaataataatttatgttgacgttctaagctgacatttttaagttttacttgtaacatctggagacctccatgtgtttttaatagttattatatcatttttctgaaaattttgatattttagtttagcatatgtaaaatatggttgataaggctgtttgtctattacataaaatcaaaaatatgctataatgtagtcactatactattttgtcgtggagaataaaatcttaccataatagatattttaagaataggagtagaattgatatggaagaccccagtcagaatttagttttgcaatttgttttattattaattttgaccttgctaaatgcctttttctcagcttctgagatggcattagtttcccttaatcgttcacgtgttgaacaaaaagcagaagaaggcgataagaaattcattcgtctattgtctgttttggaaaatcctaataactttttatcaacaattcaagttggtatcacctttatcagtcttttacaaggggctagcttgtctgcctcgcttggaagtgttattgcttcctggtttggagattttgtctgggctcagacagcaggtagcgttatttcccttgtctttttgacctatatttccattgttcttggtgagctttatccaaaacgtattgccatgaatctcaaggaaaatttggctgtcatttctgcccctgttatcatttttattggaaaaattgtcagtccttttgtttggctcttatcagcgtcaaccaatcttctctcacgtatcacaccaatgcaatttgatgatgcagacgaaaaaatgactcgtgatgaaattgaatacatgttgtcaaatagtgaagaaacactagatgctgaagaaattgagatgttacaaggtgtcttttcacttgacgaactaatggcgcgtgaagtcatggttccaagaacagacgctttcatgattgacatcaatgatgatacacaagaaaatatccaagaaattcttaaacagaatttttcacgtattcctgtctatgatgatgataaggataagattattggtgtacttcacaccaaacgcctgctagacgctggtttccgtgatggttttgacaatattgtcttgcgtaagattttgcaagaaccgctctttgttccagaaacgatttttgtggacgatttgttacgccaattgagaaatacccaaaatcaaatggcgattttgttggacgaatacggtggcgttgcaggtattgtcacacttgaggacttgcttgaagaaatcgtcggagaaatcgacgacgaaacagataaagcagagcaatttgtccgtgaaatcggtgaacatacttacattgttcttgggacaatgacactcaacgaattcaatgactattttgacgtcgatcttgaaagtgatgatgtggatactattgctggttactacctaactggtgtgggaaatattccagaccaagatagtcgtgaaacgtttgaagtggatacgaaagaaaaacaccttgctttgacaaatgataaagttaaagatggacgtgttacaaaactgaaagttattttttctgatatagaacagagtattgaagaagactaagctaatcttagtctttttcctttagaaaatgttataatgaaagcaggaaaaacggttacaaaggaagaaaaaaatgactgaaattgattacggaaaagtaactgggatgattcactcaacagaaagttttggttctgtggacggtccaggaattcggtttgtaatttttatgcagggctgcaagatgcgctgtcaatattgccacaatccagatacttgggctatggaaaccaatcaatcgcaagaacgcacagttgatgatgtgttggctgaagccttgcgttacaagcatttctggggaaaaaatggtggcattaccgtatcaggcggtgaagccatgttacagattgaatttgtcacagcacttttcacaaaagcaaaagaattgggcattcattgcacattagatacttgtggttttgcttttcgtgacacaccagaataccatgaaattgtggataaattgttagcagtaacagatttggttcttttagatttgaaagaaattaatcctaaacaacatattgtcgtgacacgccagccaaatactaatattttggcatttgcgcgttatttatctgataagggggttcctgtttggattcgtcacgttttagtacctggcttaactgattttgatgacgatttgattgaacttggcaaatttgtcgcaacgttgaaaaatgtggataaatttgaaattcttccttatcataccttgggtgaatttaagtggcatgagcttggcattccatatactttggaaggggttaaacctccaacgaaagagcgtgtgcaaaatgccaaagacttgatgcatacagaatcttacaccgaatacatgaaacgaattcatcagtaaaaatattgacattagcttgaaactttggtaagctctagcataaggtggaattctatgaacagttacaaagttttaaaatttgacgacgaattcgtttatttgacgcaagacggaaaaataaaaaagcttgcgcgtgatttatttgattttgacatcaaactaggagataaggttgattatattcaagacggagacattgtccttgttttgccaaatcaagatgaggcagctttggatttaaacgacgacaagtctgtaaaatctgggctcttacaaggtatcttgaaccttttccttgaaacattgtctatccataacaatgacctaggtaatctgaaaaagattttttctcaattattggtgacactttttatggcttggagtttacttggtgtcattgcgattgaaatcttactcttgattgaatcacttattacctttatttggcgtttgctagtcaaaggtgtgaagggattgcacattgtggataatagccgaaaatacatggcttatcgcaaagaacaagaagctatccgcaatcaagaaaatcgcgaggaagaagaacgcttgttgcgcttagccttagagcaagaaaaaacgtcaaaagcagaagctgccaaggacgattcttctgataatgaaacacctgatgtcaaagaaaccaacaatgattccacacaaaacacaacagaaaaagactaaactaaaagcatttttatcagtaattaacaataattagtgataaaggtgctctttttgtgctattattgcgataaaagcagctgctgactttgctatctcccttaaattttgctaaaataagaataaataattattatgaggtagaaaacatgtctaaaattttagtttttggtcaccaaaatccagactctgatgctatcggttcatcagttgcttatgcatatttgaaacgtgaacttggtgttgatgctgaagctgttgctcttggaacacctaatgaagaaacaacttttgctttgaattactttggtgtagaagcaccacgtgttgttggatcagcaaaagctgaaggggctgaccaagttattttgacagaccacaacgaatttcaacaatcaatctctgatattcgtgacgttgaagttatcgaagttgttgatcaccaccgtgttgcaaactttgaaacagctaacccactttacatgcgtttagaaccagttggttcagcttcatcaatcgtttaccgcctatacaaagaaaataacgttgttattcctaaagaaatggctggtttgcttttgtctggtttgatttcagatacacttcttcttaaatcaccaacaactcacgcaactgacccagctgttgctgctgacttggcagaaatcgcaggtgtaaaccttgaagaatatggtttggcattgcttaaagctggtacaaacttggcaacaaaatctgctgaagaattgattgacattgacgctaaaacatttgaacttaatggaaaccaagttcgtgtagcacaagttaacacagttgatattaacgaagttcttgaacgtcaagcagaaatcgaagcagctattacagcagcaaatactgcaaatggttactctgactttgtacttatgattactgatattcttaactcaaactcagaaatcttggcacttggttcaaacattgacaaagttgaagctgccttcaacttcaaacttgaaaacaaccacgcattccttgcaggtgctgtttcacgtaaaaaacaagttgtcccacaattaacagaaagcttcaacgcttaattaataagggataataaaaaggcgacgtgagtcgtcttttttggagaagttaaggaaaagaaatatgacagacgaaaaaatactctatcataaaaaaggaaaacattgggagattacactttcaaaaacgtcaaaaagagaaaagatagaaggtgtaataggacttcttgttctcattgcactcattgcttattttttgatgaaataatgttatttcggtaaatcctaacaaaacaaaagcaaacgaatcgttggtttgattggtttgctttttatttttgggatgttattcttgctcacggataaaggtgagggtttggtcttgggataattctggtgagaattggaagccgtcaaaggttaggtgtttgatttgctcaatggtttcaatttgtttttcagccattagtgagaccaaacgaccacgtccttttttagaaatggttgaatgaacttttggctttccgtttctattttccataaagacaattttaaccatgcgtttgcggatatttggagagaaaacttgctcaaattctgatgacagtaatgaaatgatgagttcgtcatcttggacttcttcgtcgtattgttgtctccaaaattgttttaatgatgtgttgtcaatcttgagatttccttgaaaatcaaggcgatgtggtgcgattaacgtcatgggactgattaaaccgtataaggtagtagcgatacgaaggtggttatcaagataatgtcgctccgcttcggttacctgagttcgtttcatataccgatacatgagaccgtcatataatagccatgcgggataggttttggcttgtttatctgctagacgttgccaacgtgtccattcttggtcagctttacttgaattgattttgtaaaaattagccaaactttcgatggagtatttttgtaaggctttgagcactgcttggctcttggcagataatggttggcttggaaaagcatcttgattggtatgtaattctttggcattaggaattaatattttcatactggcattatagcatagacctcaaaagttcttcaaagataaaaacttattaaaaagtgaagcttatcttcttatagcagtcgttcttgttttttgttacaataaagctatgaatattcaagaattgcgagctggcgatttgctttttatgtacggaatttccgatatgtcgcaagctatccagaaagcaactggacaatatagccacgttgctatttattttgattcgatgatttatcacgcgaccaaggataaaggtgtcattaaacagcagttaaaggaatttttgaaaacgaagcagcatagaatttttgtttaccgttatcctaggattaaggctgagcaggttcaggcagcggcggagcatttgctgggcagaccttacaatcacagtttctatccagataatggttcttattattgctcacaatatattgcggatattttgccgatttttgaaacgattcccatgcagtttggtgatgataagcatacaatttctgagttttggcagcaatattatgatgagcttggagtggctgttccgctaaatcaatctgggactaaccctagtcaattggcacagtccgagcatttgcagtatttaggagaattacatgattaacatttttaatccagataaattaaccagacaagctttttttcaagacttgattaattttctttatcaaacagatgatgtgaccttacgccaaatcaaggcaaactttccagaagttcccaaaattgaccgtttgattgaggaatacgtgcaagcaggctacattattcgtgacaataaacgctatacgattggttttgaattgcttgatagcctagaaaatgttagtttagacagtcaactttttgtagatgaccaaagtgctatctatgaggacttgatggctctgacttttgaaacacgtttgacaaatgaggctaatgatttggtgcttgttgaaaaaacaagtatcgctcgtagtgagttaaccttgtcaaattatttcttcaaattagcagataatttaccaatgtctaaagcgcaagaacctttgtatgacttgcttggagacgtcaatccacaatacgctttgaaatatatgacaacatttttgttaaaatttggtcgtaaggacgaagttgcccaaaaacgcccagatatttttgtagaaacgttggaaaaattggattatatccgaaaaaatgaccaaggcaagtacgaattgaacatgctttttgacaaagaaaacttgatttttaccagtaaagcttaaaaaaacagtccagtggactgttttttcacgagcttgaaaatagaaaagcgagtcaagtccagtggacaggtttttcatgagcctagaaacaagaaatcgagttaagtccattggacaattcacgttgtttttatcattagatagagaaaataaggagctccgataacggcaacgacaagtcctgttggaattcctgtgccaactaagcaaacacgtccaatggtatcagcgattaaaaagataatcattccgatgagcagactagacggaaggctgatgcggtggtcacttcctaataattggcgcgtgatgtgaccagcaagcagaccaataaatgtaatattgcccacaagaacaacactaagcgccgccaaggcagtcgagagtattagtgtgtagagacgttctcgttttagatttaaacctaaagcgatagctgtttcttcgttaaggctcataatatttagtgcataactttgactgtaagttagtagccaagtgactaatagcagcggtgctaaaatcatcaatgtctgccaattgccaccacttacttttccgcttagccatgagacgatataatccgtcttactcgtatcaaggttagcaatgattgaaatcatgatacctgaaagcaagctagaaatcccaacacctgtaatgataaggcgtgtcggactaatcggctgatttttctgacgtgaaacaaaataaacagtacaaatggtcagaataccacctaacatggctaaaaatggcataagcgcaatcatcattgaattggtaacatccaaaagcccaaccataatcgcaatcacgagcccagctcctgcatttattcctaaaatacctgaatcggctaagggatttttagtgagtgtttgaagcaagacacctgacatggcaagcgagccgccactgagcatacaagccaaaatgcgcggcagtctgatttgcgtgacaatgaaagacatggttgcatctgattttcctaaaaagaccttgcaaacctctagaagtgaggaattagcatatcctagagataaggatagcaggaaaataagacataacagaaaaatgagaacgctgaaatgacaagctaccttctttccagatgtcataaattttccccccttcgcaccaaccacagaaagcatggtaagccaacgatactaacaatcgcactaactggcgtttctgctggcggattgattgtacggcaaatcaaatcgacccaaagcataaaagtgctcccagcaaatgctgttaaaggaaggataatccgataatctttcgccacaaacattttgacaaaatgaggaatgataagcccgacaaatgcaatgctgccaacaagagccacggcggcagccgataagataacaacgatagcaaggaaagtcatggtcatggcaaaagttcgttgccccagagctttagcaactgtttcatcaagacttagaatggttaattgacgcgcaaaaagctgcgctaatagcaagccaaggataataaaaggcgcaataattcccaacattttccaatttatttgtgctaagccaccagattgccaaccgataactgcttttgacaaattaaaatacagcgttattgcctgaccaagtgatgaaaatagggttgaaatcatagcacctgctaaaatgagtcgaagttgttggtatccttttcgaggatggtaagctattccaaatactaaaatagcagctaaaatcgcaccaaacagacaaatgattaaaatcaaactgtaatgcatactaccaaaaatggcataacctacaatcaaggctaaaccagcgccagcattaatgccaagcaaaccagggtcagcaataggattacgagtaacgccttgaataatgctaccagcttgtgccatggcagccccaactaaaatagcagcaatggttcttggaagccgcaaatcaaaaatcacatcttgtaagttagaatcagttaaagggtgtctaaaaacactcattaattgagcattagaataagctaccgcaccaaagcgaaggcttaaataccaaccaaggataaaaagaaaacataggctgaaaaaaagaagccacattcttaaacgtttattcttttgaaaaagaaggtacagttgtttcattgtctttccctttcagagaaatcagcgaaaactacctagcgtatggattgcaggcagttctcagctggtaagtgaatttaactattagcttgcttgattgctgatacaaaaacatccagctgtttatcaagcgacattgggtctgagaagtagaagaggctttcatcaacttctaaaacgtgattatttttcacagcagaaatattgttccaaacatcgctttcttttagggaagctgccgcttctttagtgtcgtcactaacattaagaacaacgtagtctccgatataatctccaagaacttcttgtgaaatgccaaaccagccagcagggaaaacatcatcttggactttttgtggtgcagcataaccaagcgaatcataaatcaactcaccaccacgtccccagttattaccataaaggtagatatctttgtcgtaaaaatccataaccgtaaaagttgttgatgaatcaatgtattgactcagttcttctttagcttcagtagttttagtttcccagttatcaagccattcttgtgcttcatcttctttatcaaaaacttttccgagattagtcatcatttccaaataatcacttttaccgtattcaatgactaaaacaggagcaattgctttcaaatcatcaagattttcatctgttgaaaaagcaatgataaggtctggtttttgggcagcaatagcttcggtatcatctgatgttaattggacagcgtcagctaattgatcaccaaaagcagggctatttttttctaaatcaagtgaataacttgaaacattgacaccgagttctaataaataacctgtgtatgagtaggcaaaattaatgactttttgaggatttttaggaatatctccttcataagaaaatccggtaattttaggcatgctagataactcggtatcatctgaagtcgatgatgtattatggcaagcaacgagtaaaaatgttgctagaaaagtcgttaaaacggcgaaaaactttttcatgtctattctcctaataaaaatctatgttagctgataagtcagcaaaataggacgattgtggatagggtcttgaacgatatgggcttcgatattaaaaatatcacgtaaaatgtctgctgtcatgatgtcttgaaccttaccgtgatatttaatcgcgccagctttcatggcaattaattcgtcagaaaaacgtgctgataagttcaaatcgtgcaaaaccataataatagttttctgggtatcttggttaagtttttggagtaattccaagatttccagctggtggttcatatctagataagttgttggctcgtctaaaaaaatagtatctgtgtcttgcgctaaagccatagcaatccaaacacgttgacgttgaccacctgaaagcgaatcaactttttcattggcaaattcaacaactttggttatttccattgcccagttgattttttccttgtctgtgtcgctcaaacttcccaaatagttttgatgtggaaagcgaccgtatgagacaagctcataaactgaaatcccttcagtcgcttcaagcatttgggggagtagtgctaactttttggcaatttctttagttggtaaatgagcaattgcttctccgtcaataaatacttgaccagctttaagggcatgaatgcgtgttaaagcttttaataaagttgatttaccacaaccattggcaccgataattgtcgtgattttttgttttgctatggtgacagataagtcattgataatcactttatcatcgtaagctactgagatgttttcagcgtaaatatctgacataatcgacctcctttcaaaatgattttaggggaatttatcttcccaaaaacaagtccctaaatcgagaattgttttcttattgtaacaagaaaaaaggcctctgaaaagccttttgtttaaatatttttattacattttagtgattagaatcattcaaaataatacttaaaattgttctaattaaggtagtttttggcgatgttcaaatcaccagcataagctgtgcgttcaccgtttacgatttgataagcgtcagctcctttaccagcgataataacggcatctgtctcattattagttcgtgccatagcttgtgaaatagccttttcacggtcaacttgaatgtcaagtggacgtgttacttgactagcaatttcttcggcaatagcttgtgggtcttcgtaattagggtcatcagctgttaagataacgtgaagatttgggtgagcattgatgacacgagcaaagtcagcacgacggctttctcccttattaccagttgcaccaagaattaggtgaagatcgcctttttggtgttcctcaacgacagataacagtttttcaagactgtcaccattgtgtgcataatcgacaaagactttagcaccattagtttgcgtaatgacttccatgcgaccagggacacttgtttgggcaattcctttttgaatgtcagctagacttgttcccaaacgcagacaagcaagaccagcagcaaccgcattttcttggttaaatgagccaatgagctgaatatcataatgtcctgctagtttgccagtcacatcaaagtcaaaagctctgccattttcaatcgtattatcagaatccttgccgtaaaaatcatgaggagtattggcaacttgttgtgcgacaacgttaaagtaatccatacctgcattgacaaccacagctttgctatttgccattaaaagacgtttgtggtagaaataatcttcaaatgttgggtgttcaatcggtccaatatggtctggactgatattgagaaatgctccgacatcaaaagtcaatccataaacacgttcaaccagataagcttgactagaaacctccatgataaggtgtgtcatgccattttggacagctgttgccatcattttgaaaaggtcaagactttcaggcgttgttaattttgatttaaagaaagttttgccgtccaaagttgtgttcatggttgaaaacatcgcaggtttgtggctttgtttcaagatattgtaggcaaaataagcagcagttgttttcccttttgttcccgtaaaagcaatgattttcaaatcattttctggatgaccataaaattccatggcgattaagctcatggcttttttgatatcagtaacgataatcgctggaatatcaagctcataatcaacttggctaacatagaaagtcaagccattttcaattgcttgctcaagatactcttttttaaaggtcgcacctttggcaaagaaaagtgttgatttgtctgcttcgcgactatcaaaactaatcttagaaaaacttggattttctttccaatctaaagaatagtgattatggaaaataatttcgcgaaaattatggtcatttttcagaatgtcgagggttttttcaagtgtaatcatactctctattttagacttaatgtctttgttttacaagtcacaatcaaaagtttataataaaaagtaacgcttattttaaaaattaggaagaatactatgtctgaaaacaaaacaaatatgacacagcagcaacagatggtgcgcggggcggcatggttgacagcgtcaaactttattagtcgccttttgggtgctttctacattatcccttggtatgcttggatggggactcacggtgagcaagccaatgcactttttggaatgggctataatatttacgccgttttcctactcatctcaaccgcgggaattcctgttgccattgctaaacaggtttcgaagtataatacgttaggtcaagaagatactagttattatttattacgtaaaattttaagattgaccttggtattggggcttatttttgcggcgattatgtacattggctcaccaattctagctgcttggagtggtggcggagctgatttggttcgtgttatgaaaagtctatcttgggcactcttgcttttcccgtcaatgagtgttctacgtggctttttccaaggatttaataatttaaaaccttatgccatgagccaaattgcagagcaaattatccgtgttatctggatgcttttaacagctttcatgattatgaaaattggctctggtgattatgtttcagccgttgttcaatcaacgtttgctgcttttatcggaatgattgctagtgtcctcgtcctccttttcttcctttggcgcgagggtaagttgcaagctattttctctgcaggaaataatgatgttgatattgatgccaatgcgattatcattgaaacgataaaagaagctattccgtttatcattacaggagcagcgattcaactcttccagattgttgaccagttgtcatttatcaacacaatgaagttgtttacgtcgcatacgaccaaagaattgcaaattttatatgcttatttgtcaagtaatccaaataaagtaacgatgattttgatttctttggctactgccatcggtggagctggtattccccttttgacagaaaactttgttaataaagacaaaaaagcagcagcgcatttggttattaatagtttgcaaatgctgtgtatggtgcttttcccagcaatgcttggggcgattattttagcacaaccagtctatacgcttttctacggtgcgccaaatagcacagccctttggctatttgtaggtgccttggtgcaagtaattttcttagcactttatagccttttagcgcctatgcttcaagccttatttgaaaatcgcaaagctattcgatattttggttacggtttaattattaagattgttttgcaaattccgtttatctatttcttccacgcttatggcccacttttatccacagccattggtttaacaataccaattattctgatgtataagcgcattcatgaagtgacacgctttaaccgtaaagctttgtggcgaggaattcttctcgttagtattttaacagttattatgggtgttattgttgccatagcaaccgttggacttcattttattgttagcccaacgacacgtgtcggtagtgttgtttatattgtgcttgtaggtgccttaggtgtgcttgtttacggcttccttgctttggtaactcgtctgcttgataaactaatcggtggcagagcaaaagcactccgccaaaaactacatttagaatgatgaaaaaatcgctttcttgtttctaagctcatgaaaagtccacaggactgactcgcttctttatttcaaggctcgtgaaaaaacagtccactggggttaactcgctttcttatttcaaggctcgtgaaaaaacagtctattggattgactcgcttctttatttcaaggctcgtgaaaaaacagtccactggactgtttttttagttatagtttttacttatagctgattatcaagaaatagaataacgaaaaagtcatgcatttcaacgaataaatgatagaatagtttataaattttaatagaccagtatagctggtagtgatatgttttgagggggagacaccatgaaaagtgattgtagattggcaactattttagcacatgcaggaataaaatcagatgaagcgacaggagcgttagcggcacctattcatttttccacaacttatcaacacccagagtttggaaaatcaacaggttttgattacacaagaacgaaaaatccaacacgcgcaacgcttgaaaagacacttgcagcgattgaaaaagcagattatgcacttgcaacgtcatctggtatgagtgctattgttttagcctttgaaatttttcctgttggagccaaagtagttgccgcacgtgacttatatggtggctctttccgttggttcaatgataaagaaaaagaagggcgtttttcgtttgaatacaccaatacagaagcagagcttttagcagcgatttctgatgacacggatattgtttacattgagaccccaacgaacccactaatggttgaatttgacattgaaaaagtggcgaatgcggctcatgccaagggcgctaagcttattgtggacaatactttttacagcccaatttatcaaaatccaattccacttggagctgatattgttgtgcattcagccacaaaatatttggcaggacataatgatgtcttagcaggcgttgtgattacaaacgacaaagagacatatgacaaacttttctacaatctcaacacgactggtccaaccttatcaccatttgattcttatatgttgatgcgtgggctaaaaacccttaaacttcgcatggaaaaatcaactgaaaatgcgcgtgatattgttgcatttttggaaaaattacctgctgttaaagaagtgctttatacgggtaaaggtggcatgatttctttcagagtggttgatgaaagtaaaattccagatattatcaatagccttgacatcattacatttgcagaaagtcttggtggtgtggaaagtttaatcacttacccaagaacccaaacacacgcagacattcctgaagaggttcgtttgtcttacggattaaccaatgatttattgcgcttatctattggaatcgaagatgttgaagatttaattgatgacctaaaacacgcattggaggcttagtatgggaacatatgattttacaacgagaccaaatcgcctaacacatttcacatataaatggcagacgtctgaaaatgaccctgatttgcttcaactttgggttgctgatatggattttttgcctgttccagaaattaaagaagcgattatcgattatggacaagaacacatctttggctataattattttaaggattctctttatcaatcagtgattgattgggaaagaaatgaacacggctacaacatcaccaaagatgacatttctttcattgacggtgttgttcctgccatttcagttgctattcaggcctttactgaaaaaggcgatgcggtgctgattaattcgccagtttattatccttttgcacggacaattcgtctaaatgaccgtaaattagtggaaaattctttggttattaagaatggtcattttgaaattgactttgaccaacttgagaaagatatcgttgataatcaggtaaaactttatgttttttgtagcccacacaaccctggtggacgtatctggtcagcacaagaattgcaaaaaatcggtgtgctttgtgaaaaacatggcgttatcttggtttcagatgaaattcatcaagatttggcgctttttggcaacaaacaccattctttcaacacggttgatgaccgttttaaagaatttacgcttatcctgtcatcagctacgaaaacatttaacattgctggtacgaaaaacagctttgcgattattcaaaatccgaaacttcgtaagcaatttaaacgtgtccaattggctaataatcaacacgaagttccgactctgggaatgattacgacagaaactgcctttacttatggcaagccatggttggaagaattaaaaaaagttatcgaagaaaatattaattacgttgtggattattttgaagaaaataccaagattaaggtcatgaagcctgagggaacttaccttgtgtggcttgacttttcagcctatggcattgaacaaccacaattagatgaaaaacttcaaaaagaagcaaaagtggtgttaaatgacggcgcacatttcggaaaagaaggcaaaaattttgctcgtctaaacgttgctgcaccactagaaactataaaagaagccagcaaacgcatcgctagcgtctttggaaagtaaagacatcagtccaattggctgatgtttttttcataaaactgagaataatgactaattttaaaaaagtatgacattcgtcataattagtgagcatattttgccattttctgctataattgataaggttaaactaaattcagtataaaaggagtacatcatgggaaaattccaagttatctcacacccgcttatccaacacaaattatcaatcttgcgtcgcacaacaacttcaactaaagattttcgtgaattagttaacgaaattgcaatgcttatgggttatgaagtattgcgcgaccttccacttgaagatgttgaaatcgaaacaccgattacaaaaacaactcaaaaacaattagctggtaaaaaattagcaattgttcctattttacgtgctggtatcggtatggttgacggtttccttagcttagttccagctgctaaagttggtcatatcggaatgtatcgtgatgaagaaacattacaacctgttgaataccttgtgaaattaccagaagatattgaccaacgtcaaatttttgtggttgacccaatgcttgcaacaggtggttcagctattttagccgttgattctcttaaaaaacgtggcgcagctaacattaaatttgtttgtctcgtatctgcaccagaaggtgttaaagctctccaagaggcacacccagatatcgacatttacacagccactcttgacgaaaaacttaacgaacatggttacatcgttccaggtcttggtgacgctggtgaccgcctattcggtacaaaataagattaagttgattgcttaactaataataaaaaagtttgtgttctataatgaacgcaaactttttgttagtcgtggatagtgctagaaatatttttggcaaattgttgcgctgctaagggaagtgtctgccaatttttccatgcaagaacaacggttctaaatggattttcgctaatctgacgaacagctaaatcctcaagagataagccatcaaggaaattttcataaagcaaactgactcccaatccttgtcgaattatctccaagatcgtatagtcgtcataaatttcataggtaaaggtcggtacgatattttccttagcaaaggcagtgcgtgtcaaactgtggtcaccttcatcaagtagaattaactctgtctgagctaaatcagccagtgagatttcggattgctgagctaaggggtgtttgctaggcaagacggcgtaaagagaatcttgatagagaatttgcgattgcagttgcccaacgtagtccatatgggtaaaccctaaatcaacttgcccagtttctagccattggtaaatactagtatattctccctgtttgagcacaaaattgacacttggataattcgccttgaatgctttgataaaaggtaaaatgaaattccgactagccgacgtaaagataccaatacgtatctcggctttatccaacccttgcaattccttgatttttttggttagctgtttttcaccttggacgatttgttggaaataaggataaagtgtttgtccgtcttttgtgagctttattccctcattgccacgcgttagtaaacgtgttccaatctcttcttcgagatttttaatcgtctggctgacagcactctgcgaataatttagttgctttgccgttttggtaaatgagcccaattcgataactgagcaaaaaatagcatattttgaaaccataactgtatctcctaataagtaaaacttatagttatattataaactttaattttacttatgactaatatcaacttataataaaacaagaaatgaaaaatcgagaggtgacgttatgattcagaaacacgctaaattgttttcagcaactgttcctcttgcgtggggaatgtcttatctttttgtggcacttggagcttcggaaattccagccatagagttagtctctttacgctgtggtctagcttttgtggcactcgttttgctttttttccgccatttgcaaaagacgttctcgtggaaaatgatgatttacagtgcatttgcaggattgttactatttgctgtcttttatggcttagtcgttggtgtcgttgacacatcagcttcaacagcaggatttctggcttctactacggtagttattgttcctatcattcaagctatgatgacacgaaaaataccagatttaaagacaatagtagcgattctgattgttttatcagggctttttttattgactggtgccgatttatcgcaatttaatttcggtgcgattatgtgtctaatggctgcagctttatatgctatctatatcattctctctaaatattttgttgagcgagtagatgcgatgagtttgggaatttggcagttgggctttgctagtctctatgctttagtggggacgtttgcgcttgaaagacctgttttgcctcatagtgggacggtttgggcagctgtccttggtttagcattgatttgttcagcttatggttgggtgatgcaaaccattgttcaagcttatgtcagcgcagaatttactagttttatgttttcgctagaacctatttttacagccttttttgcccttttattttttggagaatggctgagcggtttagcttatttgggaactattttgatttttatcggtgtgcttttagtgacttatcaacctaaaaaagacaagcaatccattttacttcaggaaaaagtcaattattaacgttttttatttgaccttttttgaccaattgactataatagtttcagattgattattaaaactagacatggactaaaaggtgatagtcaccatttcaatttgtccatgtatcttaataaaggagaaaatatatgattcccgtagttattgaacaaacgagccgtggcgaacgctcatacgatatttattcacgccttttgaaagaccgtattatcatgttgactggaccagttgaagataatatggctaactctatcattgcccaattgttgttccttgatgcacaagataacactaaagatatttacctttatgttaatactcctggtggttcagtatcagcaggacttgccattgttgatacaatgaatttcattaaatcagatgttcaaacaattgttatgggtatggcagcttcaatgggaactgttattgcgtcatcaggtgcaaaaggtaaacgtttcatgttgccaaatgctgaatacatgattcaccaaccaatgggtggtactggtggcggtacacaacaaacagatatggcaattgctgccgaacaccttttgaaaacacgtcaaaacttggaacaaattttggctgacaactctggtcaaacattggaaaaagttcacgctgacgccgaacgtgataactggatgagcgcacaagaaaccctcgaatacggcttcatcgacgaaatcatggtaaacaacgaattaaactaattgaagataatactatattaagcccacctttggtgggtttttttgttctgagctgaccgaggatacatttaacgttaattgtggtataatcgttttatgttgacaattgatgaacaattatttgatattgatgaggctattgatgaggttgtcgcatcttttcttgagttggaaagtgtcaaagactatcggaaagcacgtgaggttttcttggcagatactgtacttcaggaaaaaatcatgcattttcaagccttgaaacaaagttatgaagatgctaagccgtatgcagcttttcgaccagaagttgctgaaatgcgtcatcaactttttaaggaaaaaagagccattgacatcaacgaaaaagtgagtcaattgcgacaaagtgaagttgctgttcaaaaaattttagcagaactatcacaaaaaatctcatcagctatttcatctgatatttttgtagatacaggtttgcctttggcaccacataaatcacaccatgggaattgtagtaaaggaggacggaaaaagcatgtttaaaaagcaggaacgtcaggggattatcgtttatttatactataatcgtgatgctcgaaaattaaataaatatggtgatgttttataccattcgcgtaaaatgcgatatcaggtcttgtatgtgaataaagaagaagcagaagatattgcaaaagaaatttcagaattgaaatttgttaaagaagtatcattatcacagtttgataatatcgataaaaattttgtaggcaatttagctcgtttttgatataatataatcttgtatgactaagaagtacgcaaagaatattgacaattttctgataattcagtattctctgaagtaactttttattagaaatttaaggagagaaattcttatgcataaaaagattgcgcttacagcgctaacttttttagcctcaattgctttagcagcttgtagtaagtcaccagacgtcactgcaaatgccacaggaacaacgattggtgacaccttgaaaattggtgttaaccttgaattgactggtgcagtagctgcttatggtaatgcagaaaatgacggtattaaacttgccgttgaagagattaataaagctggcggtgttgatggtaaaaaaatcgaactcgttacgaaagataataaatctgaaaacgcggaagcttctaccgcagcgactaacttggctattcaaagtcaagttaatgccatgattggtccagccacttctggtgcggtttctgccgctagtttgaatgcccagaaaacaggtgttccgttgttgactccaagtggcacacaggatgatttgacagtggatagtgatggcgttaaaaagtacgttttccgtacgactttccaagacagcttccaaggtcaagttttagcacagtacgcttatagcaatttgaatgctaaaaaggttgttctttattatgataactcaagtgactatgctaaagggattgctgaggaattccaagaaaaatatcaaggagagattgttgcaacagcgacatttgcttcaggggataaagatttccaatcagccttgacaaaattcaaaaacttggattatgatgcgattgtaatgccaggttattatacagaaactggtatcattacaaaacaagcgcgtgatatggggatcgaagttccaattttgggacctgatggattcaatgatgatagctttgctgacttggctggtacagcaaatacgcatgatgtttattacgtatcaggttattcaacgaaaacagcactttcagataaagcaacagaatttattgcagcatataaagaaaaatacggttcagaaccaaatatgtttgcagcgcttgcttatgactctgtttatatgattgcaaaagcagcagaaggcgcagagacttctattgatattgctaataacttagcaaatctgacagattttgaaggtgttactggtacaatgactatcgatgaagatcataacccaatcaagacagccttgatggttaagatgaaagatggtgttgaagattcggctgaagccgttgaaattacaggagataactagaggtcattttcctttagctttatatcacataactagaaagtttggtattatatgtttttagaacagctcccccaacaactggttaatggtattattctaggaagtatctatgcgttacttgctctcggttataccatggtttatgggattattaaattaattaattttgctcatggcgatatttatatgctaggtgcatttatcggttactatgctattagtagccttcacatgaatttctggattgcactcatttttacaatgattgcaacagcttgtctgggaatgattattgagtttttggcttatcgtccattacgtcattcgacgcgtattgcagctttgattacggcgattggtgtgtcattcttccttgaatatggcatggttttcttggtcggcgcaaatacacgttcattcccgcaagctatcgacattgtcagctacaagattggctctgtaacggtgacaaacattcaattgttgattttgattgtttcccttgttttgatggttgcgttgcaattaatcgttaagaaaacaaaaatggggaaagcaatgcgtgctgtatctgttgatagcgatgcagctgaattaatgggaattaacgtcaattcaacaattagtttcacatttgcgcttggttcagcacttgcaggtgccgcaggtgtgttaatcggtctttactataactcaattgaaccattaatggggatgacacctggtattaaagccttcgttgccgctgttcttggtggtatcggcattattccaggggcagctttaggtggatttgttattggtattttggaaactttatcaatttcgctcaacctttcaagttatcgtgatgccattgtttacggtgtcttaattatcattcttttggtaagacctgctggtattcttggcaaaaacgtgaaagagaaggtgtagaaaatgaaaaagaatctaaaaatcaatctttcttggcttgctttgattgttgttctttttggaatcttagaatttctagcaacaactaatattttgaacctttactacattcaaattctcatggggattgggattagtattttaatgggacttggtactaaccttgtgctcggtttctcaggacaattcacacttggacaagctgggtttatggcaatcggtgcttatgcaacagcgattatcacacaacaaaatccaacttacggtggtttctatttctcaatgcttgttgggattgtgattgctgttcttgtggcgcttgtctttggtattccaacacttcgtttgaaaggtgactaccttgcgattgcaacgcttggtatggctgaaattatccgtattgttattgtcaatggtggcgatttaaccaacggtgcggctggtttgacaggaattttgccatacacaacatggccagttatctttatctttgtcgttgcaattacgattttgattttaaatttcctacgttcatctattggacgtcaagttatttctgttcgtgaagatgagattgcagcagaagcaatgggtgtcaacgtcacaagaatgaaagtcttgatttttgtaatgggagctatcatttcagctattgctggctcactttacgttggctacatcggaacagttgtaccaaaagactttactatcatgaaatcaattgattacttgattattgccgttcttggtgggcttggttctatcacaggaactattctagcagccattgttttaggaattcttaacatgttcttgcaaaacgtttcaaacctccgtatgattatctattcattggcattaatcttggtaatgattttccgtccaggaggacttttaggaacaaaagaattcacattatcacgtttctttaataaaactaaggggggcaatcattaatggcacttcttgatgttaaaaatttaaccaaaaatttcggtggtttgacagccgttggtgatgtcacaatgcatctaaatgagggagaattagttggtcttattggtccaaacggtgctggtaaaacaacacttttcaaccttttaacaggtgtctatgaaccaagcgaaggttcagtttctttagacggcacattgttaaatagcaagaaaccttataaaatcgcatcacttggtctttcacgtactttccaaaatatccgtctctttaaagatatgaccgttttggaaaatgtacttgttggcatggctaatcaaaataaatcacatgtctttgcaagctttcttcgtttgccaaaattctatcaaagcgaggaagagttgcgccaaaaagctatggatttgttagctatctttaatttggatggggatgcagataccctagctaaaaatcttccttacggtcagcaacgtcgtttggaaattgtgcgtgcccttgcaactgaacccaaaattctctttttagatgaacctgctgctgggatgaacccacaagaaacagcagaattgacacagttaattcgtcaaatcaaagaagaatttgacattaccattatgcttatcgaacacgatatgagccttgtaatggaagtgacagaacgtatttacgttcttgaatatggacgtttaattgctcacggtacacctgatgaaatcaaaaataatcaacgtgttattgaagcttatcttggaggtgaaggataatgacaatgttaaaagttgataatttatcagtccattacggcgttatccaagctgtaaaagatgtttcttttgaagtcaatgaaggagaagttgtcacacttatcggtgccaatggtgctggtaaaacttctattcttcgtacgatttctggtttagttcgtccaagtgctggtaaaatcgaatttttaggacaagagattcaaaaagaacccgctcgaaaaatcgttgctagtggtttgtcacaagttcctgaggggcgccacgtttttccagggttaactgtgcttgaaaaccttgaattgggcgctttcttacgtagtgaccgtgaagaaaatcaaaagaatttgaagaaagtttttgatcgtttcccacgacttgaagagcgtaaatcgcaggatgcagccacactttcaggtggtgagcaacaaatgcttgctatgggacgtgctttgatgagtcagcccaaattacttcttcttgatgaaccgtcaatggggcttgcgccaatttttatccaagaaatctttgacatcattcaagatattcaaaaacaaggaacaactgtcttgttgattgaacaaaatgccaataaagcgttagcgattgctgaccgcggttatgttttagaaacaggaaaaattgttctttcaggaacaggtaaagaattgttagaatcagaagaagttcgcaaggcttacctcggtggctaacaaaccgttaactgaatttagtatttaaccaagtctaggatagttgttatactaggctttttatcattaacaacattctcgtctgctttattttcattattttttcaatctttggtgaaaccgtttgcggtttgtggtataataataacaagaaaataatgcggagaattgttatggcagtaaaagattttatgactaaaaaagttgtttatgtgtctcctgatacaacagtagcacatgcggctgatatgatgagagaacaaggcttgcgtcgcttgcctgttatcgaaaatgataagcttgtcgggattgttaccgaaagaacaatggcagaagctagtccttcaaaagcaacgactttgtcaatttatgagatgaattatttgcttaataaaactaaaattcgtgacgtgatgattcgcgatgttgtgacggtttcaccgtacgcaagtctagaagatgcgatttataccatgatgaaaaatcgtgttggaattgttcctgttgtcgaaagcggccaagtctatggtgtcatcacagataaagatgtcttcaaagcttttcttgaaatttctggttatggcgaagaaggtattcgcgtggctatttcggctgatgatacggttggaactttggcaaaaattgtagatacgatttcaaacgacaatctcaatatcaaacgtaccgttgttgccactcgtaaatctggaaaagttgctattgaaattcaaatcgacggtaaagctgacgttgcagatttgcgtgaaaaattgcttaaccaaggcattcaagttgatgcgattgaattaacagaagcaaaatcattggattgattggtaatttaactgagagagcagaatttagtttcaaactaggttctgtttttttgagggacgagatgtaaagtcatgtttattaactttttatgcttgaatccaataagttagcgaatttgctagtgttatttttgcctgttttttgttaaaatagaagcatagaaagaattttaaggaattttcatgaaaaacggtataattatttcatttgaaggtccagatggggctggaaaaaccacagttttagaacaagttcttccagttttgcaagaaaagggctatgatattgtaaccacacgtgaacctggtggtgttgaaattgcagagcgtattcgtgatgtcatcttagatgtcaatcacgttgctatggatagtaagacagagttgctcttgtatatggcagcaagacgtcaacattatgttgagaaggttctgccagctttagaggctggtaaagtggtcttgattgaccgttttattgatagttcaatcgcttaccaaggcgctggacgtggcttggataaagatatcattacgagattaaatgactttgcaacagacggtagaaaaccagacttgacgctttattttgatgttgaatcagaaattggtttagccagaattgctaaaaatgctgagcgtgaagttaaccgacttgatttggaaaaattagacatgcacaagcgtgttcgagaaggttatttagccttgactgaacaagaaaaacgtattgtgactattgatgcgtcacgtgaattggcagatgttgtgttagagacacttcataccattcttgaacagttagcaaaaaatgagtagagggatttagatggaattagagcacttgcaaccccaactttttaaagagtttaatcaaattttgaaatcagataggatgaaccacgcctatcttttttcaggggattttgcgagctttgattttgctctttaccttgctaaaagtcgtttttgcgaaaatctccaagatggtttgccatgtggagaatgccgtgagtgtcagttaattgctgaaaatgaattttcagatgttaagattgtcaaaccaagcgggcaagttatcaaaactgatacgattcgtgaattgatgcgcgatttctcacgttcaggttttgaaggcaaatcacaagttttcatcattcaagattgtgaaaaaatgcatgttaatgctgcaaatagccttttgaaattcattgaagaaccgcaaagttcttcctacatgattttgttgactagtgatgaaaataaggttttggcgacgattaaaagtcgaacacagattttccattttccgaaaaataagccgctgttgattgagcaagctgaaaaagctggagttttgaaaacacaagcagaaatattagcagaattggcaaaaacaccgaagcaccttgatgaattgatgcaagataaaaaaatattggatgtcattcaaacttgtgagcgttttgtcacggttctgtttaaggaaaaaatgctagcttatttagaaacagggcatttggttcaagttgctttagaaaaatctgaccaagaacttgtttttcaactcttgccgctatttttagcaaagcaatttaatcaaaaagaaagtttggtttatttagaaaaaagttataaagcgcaacaaatgtggaaaagcaatgtaagctttcaaaatgcgctagaatatgtggtgatttcatgacagaagtattgagcgtaaaatacgaagaaacaggcagtattgtctatgttttaccaaataaaaaatataaactcggcgattacgtcgtcgtcaaaaataaaaaagggtgtcgtttggcgcaagttgtcactagcaacgaagtcatcgatgaggtcaaattacctgctgagatggattctgtgacgcgtcttgccaacgaaaaagataaacaagccttccaagaaaatattgacttagcgaagcattcgttttcaacggttaatgagctgattttagccaatgacctaaaaatgaaagtgattgatattattttcccattggaaagaagctatgtgcttatcacgttttcagcagaagaacgtgttgattttcgtcaattgctacgtgacttagcaggtcatttcaaaacaagaattgaacttcgccaaatcaatagtcgcgaagaagctaaggtttatggtggtgttggaccgtgtggtcgtgccctttgctgctcaagcttcttgggagaatttccacctgtatctattaaaatggtcaaaaatcaaggaatgtcactcagcacaggaaaaacagcaggcatctgtggacgtttgatgtgttgtttgagttttgaagatgacttttataaaacctctaaggagaaattccctgatgtgggaacggagattgaaacagctgatggcttgggagttattgcggggattgatgtgttttctgataccgtcaaagttcgtttaccagaaaaacacacgcttttaacctatgctttagaggaggtcaaagtacgtggataaaaaagaattgtttgatgcctttgatggtttttcacaaaatttaatgattaccttggctgaaattgaagccatgaaaaagcaagtgcaatcgctcctagaggaaaatacagctttgcgtcttgaaaatgataaaattcgcacgcgcctagctcaacttgagcaagatacgccagctaaatcttctaagcaaggaaaacgatatatcgaaggcatttaccatgatggtttccatatttgcaacgactactatggtcaacgtcgtgaaaacgatgaagaatgtatgttttgtatggaagttttagatagggagtaactgcctatgaaagtacaaaaaagttttaaaaatcagacaacctatggcaagttatatcttgttccaaccccgattggcaatatgcaagacatgacttatcgtgccgtggaaatgctaaaaaatgctgattttgtctgtgcagaagacactcgcaatacagggcttttgctgaaacattttgacatttcagccaagcaaattagctttcatgaacacaatgcctatgaaaaaattcctgaattgattgctctgatgaaagaaggaaaaattttggcacaagtgtctgatgctgggatgccttctatttctgatccaggtcatgatttagtaaaagcagctatcgctgaagagattcctgtcgttgctatcccaggggcttctgctgggattacggcgcttattgcgagtggcttagcaccgcaaccgcatattttttacggtttcttgccaagaaaagctaagcagcagaaggaattttttgaagctaagaaacagtatcctgaaacacaaattttttatgaatcaccttaccgtgtcgcagatacattggacaatatgttagcaatatatggtgacagaaaaattgttttggttcgtgagttaacaaaactttatgaagaatatcagcgcggatacatctcagaaattttggaatacattgcccaaaatcctttaaaaggagagtgtttaatcgttgtatctggtcaagacgagacagtgacatcagaagagatgccagaagatgtcaatcctgctgaactcgttgctcagttagtcgaagctggggacaaaccaaatcaagccattaaaaaaatagctaaaacttatggtttaaaccgccaagaagtttacaatgcttatcatcaactttaaagattattaatcagttgagacaaccaccgatgattatggaattatcatcggtggttttttgtcttcaaagtttttttacttagaatttacaattttatgttagaaaatataacattgatggttatatcaaaaatagcgacttagctaacatttctgtgtcaagttatacaattgataaaaccactattatcaagggaaaaggagtatttttgaatgccgaaaatggctaacattttatgtaataaatacagaaaatttagaaaatttaccaaaaaacactttacttaactaaaaaataatgttatattatctaacataaaatctcgcaacgcttgttgtagtattttagaaaattgactttaaggtttaaagtcttaaaatataaaaggagtttttgatatggatgcaggaagtatagcttttatgattatctgtgctagcctagtctttttgatgacaccaggtttagcattcttctatggtggtttagggagacgcaaaaatgtcattaatacaatgatgatgtgtgtgattccgattgctgttgcttcagtaatgtggatgatttgtgggtattccctttcatttggtggtgatggaagcctaattggtaatttctcgcatctctttttcaatggtgttagcgaaacggctagcacacgtggtttagaaattcctgatgcgttattcgcagcgttccaaatgatgtttccaatcattacagttgccattttaacaggagcggcagcaggacgtatgcgttttacacctttgattattttcatcattttctggcttctcttggtttatttcccatttgctcatatggtctgggatgaaggacttttggctcaatggggaacaattgactttgctggtggtgatgtcgttcatattacctctggggtttcaggtttggttttggcattagtacttggaaaacgtcgagattataaccgtttagaataccgtccgcataacgtaccatttgttttccttggtgcaggtcttctctggtttggttggtttggattcaatgctggttctgcccttgcagcagacgggcttgcagtccatgcctttgtcacaacacacatttcagcagcggcagcaatgttgtcttggttgattgttgaaaaagtgttaactggaaaattctcacttgtcggtgcttcaacaggattggtagcaggtcttgtcgctatcacgccaggagcaggttttgtttcaacttggagctctcttctcattggtctttgcgttagcccagtttgttattttgcgatttcagttcttaagagtaaattcggttatgatgatgctttagatgcctttggttgtcatggtatcggagggatctttggtggtttggtaacaggacttttcactacaccagaactcgctcttgacggaaacaatatcggcttaatctatggtaatgcgcatttattcctagtaacaatagcagctatcatttttacaattgtttggtcagcggtagcaacttttgttattattaaagtgatttcaatcttcacaagtattcgtgttgaggatcgtgcggaagctattggtcttgatgatagtgagcatgaagaaacagcttacccaacatttatggggcttgattcataattaaaggatagttagaaatctgagctaaatagaaacgtttagaaagagagtgtattatgaaaaaaatagaggcgattatccgttcagaccgtttggaagatctcaaagatgccttatctaaagcaggatttaccaagggaatgacagtcagtcaagtgcttggttatggaaaccaacgcggttttgcagaatatgttcgtggtcaaaagattgtgccaactttgcttgcgaaagtaaaagttgaaattgtgacacatgatgcggcggttgatgaaattgtggatatcatctgcaaagctgttcgtacaggtgaagttggagatggtaaaatttttattcttccgattgaagaagttgttcgtattcggacaggagaacgaggtggtgatgccgtttaagttttaaaatctccgaagtttagtcaagcaaaaatagtggtagaaaacctgaattcttaaaggattcgggttttttggtataaaaaagctgagacaaaactgtccagcttctttgtttatatagttattgtttacaagacgcaattaatttttgttccgtgcgcagcttgggcacctgttttttcaataagttcttggtaattatcagctgtgacaccgccaccaatcatgatttcaatacgaccgtcagcgtgatcaacaagctctttaaggtgagcaatgttttcaaaaatgtcattattttgagcagacccgtgtgtcaaaatacgtgtaaagcctaattcaaccaattggtcgagggcttctttttgctcttcaagcggaatgtggtcaaaagccatgtgaaaaacaagtggcaatccttgtgtggcaggaagaagttgttcgataccgtcttggtcgatgtgattatcttctgttaataatcccaaaactaaactgtcactttcaagttcaacggcatgaagaatatcgtcttccatgatgcgaagttcgctatcattatagacaaagttaccaccgcgagggcgaatcattgttgccagtgcgatgtctttttcatgcaggtagcgtgccgcttctttgataacaccataagatggcgttgtacctccaacggctaaattatcacaaagctcaacacgtttaacagacttatcgagttgattgagaagtgttgtattttcagcacaaaattctttgataatcatttggactccttaattatttactacttatcattatatcatgattatttataaatattttgagtaaaaaatctcaaaaatctttacaaaattcagaaaattgtgttataatttataccattatacggaggtatttttatgacaatttacaatttctctgcaggtcctgcagtgttaccgaaaccagtgcttgaacaagcacagcgtgaaatgcttgactaccaaggtagcggcatgagtgttttagaaatgtcccaccgttccaaagagtttgataatatcattaaagaagcagaacaattattgcgtgaattaatggctattccagataattataaagtgatgttccttcaaggtggtgcatctacgcaatttacaatgcttcctttaaaccttgctaagggacgtaaggcatattatctagttggtggttcgtggggtaaaaaagcttatgcagaagctgttaaattgtccaaaactgttccttttgaaccattgctactagcatcatctgaagatacagtatatgaccatatccctacttttgattcaaaagatattgacccagaagctgcttatgttcacatcacaacaaacaatacaattgaaggaacgtctatttatgatcttcctgatacaaatggtgtgccaattgtagcggatatgtcttcaaatattctggctgtacgttacaacgttgaagattttgctttgatttatgcaggtgcccaaaagaacattggtcctgcaggggttacagttgtaatcgtccgtgaagatttcttgaatgatgaaccaacgctttctgctatgcttgattaccgtatccaagcagaagcgggttcactttacaatacaccgcctgcatataacatctatattgcaaaacttgtttttgaatgggtgaaagctttcggtggtgttgataaaatggaagctgctaaccgcgaaaaatcaggtttgttgtacgatttcattgaccaatctgacttctatacaaaccctgttaaaaatccagcagaacgttcagtagctaatattccatttgtaacaccaagtaaagaacttgatgctaaatttgttgctgaagcaacaccgcttggatttaaaaatatcaaaggtcaccgctctgtgggtggtatgcgtgctagtctttacaatgcattcccacgtcaaggggtacttgatttgattgaattcatgaaaaaatttgaagctgaaaataaataattgttttattaccactttcgcatcgaatttgttataaaatagattcataatcattagaagaggtaataatatggaaattagacaagcttttcccaatgaagtcgaccaaatcatgctcgttattgaggacgcacgaaaacaattggcagcaagcggtagtaatcaatggcaagggaaatatcctgatgaggatacgatttatgatgacgttttgactggtcaagggtatgtagccttattagatgggcaaattgtagcctatgcagctgttatcactgatggtgaccctgcttatgacaagatttacgatggtcagtggaaacacaataatcaccgttacatcacatttcaccgtgttgctgttttgtctagcgtgactggtcgaaaggttgctcaaacatttcttcaaggattgattgaaggaactgatggacatgatttccgttgtgacacccatgaaaagaatggtgccatgcaacacatttttgagaaacttggttatgtctattgtggaaaagtgccaattgatggtgaacgtctagcttatcaaaaaattaaaactaaggatgagaatgctctctatcaagaagttgatgaggctgatcaccatagttattaacaataacggaaaaggaaggctttttgtagcctttgtgtgaaataaatggtatatagtgttaaaacgtttaataatattaatcaagtagggcttaaagaattaggaaatcatttccaaattgatggtgagttagctgagaatccagatgcctatattcttcgtagtcaaaatttgcatggaacagtatttccagaaaatttaaaagcgattgcgcgtgcaggtgcaggaacaaataatattccgattgatgaagcaacggcagcaggaattgttgtctttaatacgcctggtgcaaatgctaatgctgtaaaagaagcggttcttgcttctatcttgatgtcagcgcgtgactacatcgctgctaatgcgtgggtaaacaccctttctggtgatgatgttccaaaacaagtcgaagctggtaagaaacaatttgctggtaatgaaatttctggtaaaacgctaggcgttatcggacttggtgctatcggtggtcgtattgctaactatgcacaacgtcttggtatgaatgttctagggtatgacccatatgtttccattgaaacagcttggaacatttctcatcacgtcaaacgtgtggctgatgtcaaagaaatctttgcgaattctgattatatcactgttcatgtgcctttgactgatgaaacacgccatacatttgatagtgaagcgtttggtttgatgcaaaaaggaacggttgttatcaattttgcgcgtggtgaattggttgacaatgcagcactttttgaagccattgaagctggtgtcgtgaaacgttacattaccgactttggtacagaagagttgcttaacaaagataaaatcacagttttccctcacgtgggtggttcaacggctgaagctgaacttaattgtgcgattatggctggtaagacaattcgtcaattcatggaaacaggtgagattactaactctgttaactttccaaatgttcatcaagcattgactgcaccgtatcgtatcacattgattaataaaaatgtgccaaatatcgttgctaaaatttcaacagcggtatctgacttaggcattaatattgataatatcatcaatcgttcaaaaggtgactatgcttatacgctacttgaccttgatgaaactgataaggcgaaaattgatcacttagttgctaattttgaagctagtgataatatcgttcgtgtacgtttaatcacgaaaaaataacaatagagattggaagagttgggagtatttctcagctctttttttctttttttgctataatggttaaaacgatttcaaaattaggggagggagatagtttatggataaaaagcaattaaaagaataccaaaaacagttaagagaacgatttttcagtgttcgatttgataataaaaaaacaaaatttggttctgttagttgaccgtgaaactggagtagaatatcttggagtgacggctggtctaggtgatccttcggggataacacctttaattaatgcggatgggacacctaagattaatacagaatggcagaaccatcagttatagataaggaagcagagcttgctttttctattaggcatatggattaagtgggagtgataaaatgttaagaaagttggtttatcagtctgagttaggagaaatagtagtattagctaatgaaaaagggctcttaggttgctattttctaggacaaaagtattttgaatatggttatgaacgcgaaaaaattattgaagaaacgaccatttttttagatgaggcaaaagtttggttggatgattattttgctggtaaaaatcccgacccgagtcgattgaccttggtgccttatggtacggcttttcagaggaaagtttggaaagtcttagcgcaaattccttatggggagacaatgacctatggacaaattgccgaaaaaattaactgtggttcggcacaagccgttggtggggctgttggtaaaaatcccttgtctatcattgttccctgtcaccgtgttttaggaaatcaagggcaattaacaggctatgctggcggagtagagcgaaagtgttggctattggaacatgagaaagctaatttttagaaggagaaagaaatgtttactttttatgaatatccaaaatgtagtacgtgtcgccgtgctaaggcggaattgcaagaattaggtgttgattttgtagctgtcgatattacagttgatacacctaaggcagaacaattgaaagaatggattgaaaattcaacatatactatcaagaattttttcaacactagcggacaagtctaccgtgcacttggcttaaaagataaaatcgatagtttgtcaattgatgaggcagcaagcctcttggcttcagatggtatgctcatcaaacgtccagtattggttaaagataatcaagtcttacaacttggtcaccgcaaatcctatgcggaattgctagaaaaataaaatcaaccactttcgttatagaaagtggttttttgtgggaatttttgcccaatgaaaattagactggtgagccgatgttgatagattattttttcaaattaagctagtgaggtctgaatttgattttcaacgaatgttaattatcttgcaggaattcgtttagtaatttttggaaatcttggacgacttctcggtgattatcttttcgtttgacgatagagcaagcgattcctgatgtttcttcaaagggaatccatgtgagatttggtgtattgtcctttaaaaatcctgggacgaggcaaaccccacgaccagataaaatattggtaatggtagatgagtgatttgggctattaaaggtttttacttgggatttagagattacttttttctgagcttctttgagttctttggggctgatttggctgaccattaaagtttgattgttgaggtcagtagatttagctgttttcaaagttgataggggatgagaattttcaacaactaagtaaatcgggctttggtataaaaaggttgcttccaattctgtgatgtttggcagtgatgaagtgatagccagtgctatgtccagttgcctgtttaacaattgttcgagagcatccgtagcattgaactgcacatcaatataggtatttgggtgcgtgtgtgagaaaatttttatggcttgaggtaaaataggcagagctttaatgtcaaaaatagctaagcgaatggtttcgttataacggtatccaaaattttgcccacgctcaatggcttcttgaagatgattttgaatttggcgtaaatcttgtgtgaattgtttaccagcaggtgttaagacggcgccttttcctgaacgctcaaaaagttgaaatccaatttcatcctctaatgttttgatatgataggacaaggtcggctgagtgatataaagattttcagcagcttgcccgaaatttaatgtgagtgctaattccaaggcacattcaatttgtttagaattcatcaattctccttatagaaaaattctatcaattatctaaattatcagttagatatttctattttaacagattataataaaaatagaaattaagagaggtgaaaaatatggctaaagaagtgattgttttacttggagctggcaagatggggctggctattgttagacggattgcgagcggaaagaaagttgttctcggtgatttaagttcaaaagttttggagacagcaaaagaagaacttttagatgctggttttgatgttgatataaaaattgtcgatggttcaaatcgtcgttctataacagaatttgcagaatacgcagcgagtttcggtcaaatttcccgttatatccataccgcaggagtttcacctaatatggcgaagccagaagatattattaaagttgatttgattgggacagctattgctcttgaagtctttcgtgattatattggaaatggcggagctggtttggtgatttctagccaagcaggtcatatgattccttttgcggctgattttgaaaaacaattagcgcaagtacctgctgatgagcttagcgatttagcagaaatcaaagcggttgataattctggttatgcttatggtatggcaaagcgtgcgaatattgtccgtgttcaacatgaagcaatcttgtggggagataaaggagctcgtatcaatactgtgagtcctggaattattattactccgcttgctcgtcatgaattgcaagcacagcctgaatcctacgcgcgcatgattgaagctagtgcgacaggacgtacaggaacgccagacgaagtagcgcgagctggagaatttttgcttagtgatgatagcagttttattacaggaacagatttgttaattgatggtggtgttatggctgctattaaggcaggacgttatcaattaggaatgtaaaaggagataaaaatggaacaaacttatttatcattaaataatggcttaaaaatgccacaatatggtgttggtgtgtatcaagttgcaccaaaagatacgaaacaaaatgtattagaagctttgaaactcggttaccgtcatatcgatactgcacatgcttatcaaaatgaacgtgaagtcggtcaagcggttaaagaatctgggcttaaacgtgaagatatttttatcacttctaaactttggccaagcgattatgcagacagttctgccattgataaaatgttggcacgtttggatactgattatattgatttgcttttgcttcatcaacaatttggtgattatatgacagcttatcaaaatatggaaaaggctgtggcagagggaaaagtccgttcaatcggactaagtaattttgagtcagaacgtttggaagaagttttggaagcagctacgattaaaccagcagcgctgcaagttgaatgtcatccttattaccaacaagatgagcttaaaaaacgtattgcaccttacggaacaatcattgaaagttggtatccattggggcatggcgacaatgctttgttaaatgagccgctgtttctcaatttagcagacaaatatggtaaaacaccagcacaaattatcttacgttggcatattcaagctggaaatgcagtctttccacgcagtttacatcatttagatgaaaatattgctatttttgatttttcattaacagatgaagaaatgaatcaaattaaacatttagacaaaggaactcgttactttaccatgacgttagaagagcaagaaagagcaatgggttcttggaagccagcggattaggagagaaaatgtctgtcgaagaagaaattattgccattcataagcggataaatgaagcgattgttgcgcgtgattttgaatggcttgagcattattatcctgatgatatggtaattcgtcattctggcggtgttactcaaactaaatcggaatggctgaaaacgttgaaaaacgggacatttcgttattatgattatcatttacttgaagccaatgtgacaccaatcggaaaagaacgtgccattctaagttttcgagcaactacggatgcttcgatctacggttatcgaaaagtatggaaaatgcagtttgatacaacgttcaaaaagattaatggcgaatggaagcccgcatgataacacaaaaaagttcctttcaagagagaggaactttttattgattatttttcctacctgagataatcatagtgattcctaaaatgaggaggcttgaaaaaacgcaggtgcctagaataatggtaatgagccagctaaagtaggcatcggatggaccactgaattgtcttagcatcatggtttgaaggaaaaagagtgaaaagagtgaagaagcaaaggaaatgtttttgcttgccttgagataagcagagctacttctacgaaggcgaaatagctgaatcattgaactgatgaaattaataaaagtagctagtgcaatgagatagactaaaaatggataggcaactccgatattgtcatcgtgttgtgaaacaaaaatgaccatgatatggaaaataaaggcagctatcatcagaaagtagccgacatattgataaaatttccagctgttccctttgttgcgctgcatactttgtcctgtgtaaaatttcgcgattgcaaagagtaggtggtaagcggcgtagatgagataccagacagattgcaatgcaaaacatgacaccagcgacatgatgacataaaaagcattataaatagcacctgttgtcatggaaattcttgcctttaaccaattattttttaagagtgcaaaatgatttagaaaaagacgtatgaggcagatgattagccaagtatcaagcgcagctattattcctgaaaatacggatagaaaatcaacgagtataacattgctaaggcggtgagaaattaccaaagcgccagatattatcatcagtagattaagtcctagaaaaatcaggcgatgctttttaaataacgcaagtgatttttgaatagtctccaaaagcccctcctaaaaaataatggtatgaatgattttgataatgtaggtaatgtcgtcgtggcaatcgtccataacccagtcatagataatccgacgaataccagcggtgtagaagtgtgtcatgtagcgaatcatcttttcatcggtaaatcccttggcgtggtaacgattgagaaactgctcgttaatatgctgttcaacaactttctcatgctgaaaatcagtgggatttttgaggtagattttatagagtttttgatgatttttaatgtaagttaggtaaggcagaagatagtaagaatcaagcaaactgtcatgctctttttcagcttcaaaggtttcttgaagtgatgcaaattcagctgtaaaaatatctgcaagataagccatggcatcctctagtaaatcagattgattgtcatagtaggcataaaaagtggagcggtgaacacctgcctctttgcagattttactgattgagatttggtcaaaatcaaaatcgtctagtaatagaattaaactttgtttgagtttttcttgagcagaatgcgtcataaatctctccttatttctaaaaccattttaacaaaaaaatctcacaaggtgtatgttaagctattatttttagacatttaaatccgacaaattcttgtaaaggtgctacttgctctcagctgccctaaaagtgaaaagtaagaaggcttgattttttaataaaaataatctcctaagctaaaaacttaggagattttatgtgggttataaatcaatttccaagacaattggtgtgtggtcttggcgtgcgcctgagtcaatcatttctgatttcgtgattttgtctgcgatacgacttgatgtgagccagtagtcaatacgccagccactattgttgattttgcttgttttgctacgttgcgcccaccagctataaacatcaggaatatcgccatggatgtagcggaaagtgtcggtaaaaccttttgctagtaagttggtgaatcctgcacgttcttcatcggtaaagccaggagaacgacggtttgaacttgggtgtgccaagtcaatttctttgtgagcgacgttgtagtcacctgttgccaagactggttttacttggtctaattctgccaagtaatccgcatatttttcgtcccagatttgacgttcagccaaacgttttaaaccgtcaccaacgtttggggtgtaaacttgtgtgacgaaaaatttgtcaaattcaagggtgataatgcgcccttcactatccatggtgtcaggagcaccgatttcaggatatgaaatgcttggtgtcaagctacttttgtagagaaacatggtaccagcatagccttttctggcaggttcaacagatgaacgccaagagacctcgtattcaggaaaataatcttgcaaaatttgcaaatgctttttggtcggacctttggctgacaattttgtttcttgaatggcaatgatgtcagcattttcagtaaccaaggtatcaataacagcgcgagacataacagcgcgtgcggaatcgctagtcaaagcagcgttgagtgaatcaatattccacgaaataagtttcataactaagctaccagaaccttgtaggaaaacaagattctcttctttctaaaaaaatctaatcgttaccccctattttaacaaaaaaagaaacagtacgcgactttgatgatttgaaaggtggtttttccaacttgctttgccttatgttttgggtggtgttattggtgtaatggttattgtgccagtgctttattcgtttgtgcttagtcgtcactcaaacaagtaatttcaggtaataatgtgtgatttcaatagcttcgaggtctggttgggcgtgtagccaccagctaagcgttgttaaaaaagtatcaataatatattggtccaacagttggtcaggtaacgcgttttctttaaagtaaatgggcttaagaatgggaaccaaatatttttgaagttctgcttgtagactgcgactaaaataatcgtcttccagctggtaaagggttgtcactttatcagcattttctttgaagtgttggtaaaggtgagttacttgctcttcaaggctgcctttgtgtaaggattggttggtttgatgttcagcaagcgaagaagtcacaaaaacgtgttgaaaaagctgttgacaaacagcgattagcaaatcatctttgctcgtaaaatgactataaaaggttgaacgaccaatattagctttctgacataattcgccaatgcgaatatcgtgaaatgatttttgagctaataaatcaaaaaatgcggtaaaaatggcttcctgtgttttgacttcctgacgtgtcatgagatttctcctaaaatggacattttttcttttttgtctattattgaacattataatatttttgcgtatggttttaaagttaaaagtttaagataatagagataatttaaagaaagaagtaatcttatgacaaatacattacataaatccattttaaatcttgcgataccagcaacgattgaaaatattttacagaccttggtggggtttattgataccttgatgattgcaaagcttggcttgacagcggtgacagcagtaggtgtttctaatacaattcttaatgtttacttagcggtttacattgccattggagttggaagttcagcactggtatcgcgaaatattggtgcgaaaaatagcaaagctgcaaagagcgttgctgttcagtcgatttatttaggactcattgttagtttggttttgggactggtagcgttgctgtttggacattatcttttgctttggatggggcttgatgcaacagaattggcagcagccaaaacttatttttaccttgttggcggattgacgtgttttaatagtttgatgactgttttagcaagtattattcgtgcaactggtgataccaagtcgccgatgacgatttcagctatcacaaatgtgacgaatgtctgtgttgactatattttgatttttgggattgggtcgtttgctggacttggaatattgggaacagcgattggaacagtaattgccagaatctttggaacggttttgttgtttaaaaaattacaatcttcggcactagccttgaaaagagaggatttaaggtttggaagtcgtgataaggaattgatttccttgaccattccggcgacagcagagcgtttggtcatgcgtttgggacaagtggtttatatgagcttgattgttgcgattagtagtaaaacgtacgccagccataatattgcaggttcaattgaatcatttgtttacatgccagcttatggtttagcaacggcagcagctgttttgattggtatggcaaagggtgaaaaagattatcataaaattcgtcaagttggtttttggtcaaccctttatggcgttgttatcttaggatttttcgggctatttctgttttttggtggagcttattttgccactttctttacctctgatagctctgcgattgcccaagtgggcattgctttaaaaattgatggttttatccaacctgttttggcgattagtttgattttagcgggagctcttcaaggaatgggggataccaaaacgcctctttacagcacaattattggcatgtggggaatccgtgtggttggtgtatttctcttaggacaatatcttggtttaggcattgcaggtgtttggttatcgattctaattgatttagccattcgagctatttttctatcttatcgctttaataaagtcactaaaatcttggcgtgattgccaggattttttcgcattgttatgcgattttacctataatcagctataaatttatgttataattaggtgttatcaataagggagtttcattagctcctatttgaaaggaaagaaaatgactagtaaacaaccattttacattacaacaccaatttactacccatcaggtaagcttcacattggttcagcttatacaacaatcgcttgtgacgttttagcacgttacaaacgtatgatgaactatgatgtcttttatttgacagggcttgacgaacacggtcaaaaaatccaacaaaaagctgaagaagcaggtatcacaccacaagcttacgttgatggtatggctgctgatgttaaaaaactttggaaaatgcttgatatctcatatgataaattcatccgtacaactgatgaataccatgaaaaagttgtcgctgaagtttttgaaaaattattggcacaagatgacatttatttaggtgagtattctggttggtactcagtttcagatgaagaattctttacagaaagccaattggaagaagttttccgtgatgaaaatggtaaagtcatcggtggtattgctccttctggacacgaagttgaatgggtttctgaagagtcttacttcctacgtcttggaaaatacgctgatcgcctgttagaattcttccatgcacaccctgagttcattcaaccagatggtcgtatgaatgaaattattaaaaacttcattgaacctggtcttgaagatttggctgttagccgtacatcatttacatggggtgtaaaagttccttcaaatccaaaacacgtggtttacgtttggtttgatgcccttctcaactatgttacagctcttggttatggtcaagaagaccacgcaaactttgataaattctggaatggtacagttttccatatggttggtaaagatatcttacgattccattcaatttatttgccaattgtgttaatgatgttagatgtaaaattgcctgaacgcttgattgcccacggttggtttgtcatgaaagacggtaaaatgtctaaatctaaaggtaatgtggtttacccagaaatgttggttgaacgtttcggacttgacccacttcgttattacctcatgcgttcacttccagttggttcagatggtacattcacaccagaagattacgttggacgtattaactacgaattagcaaatgaccttggtaaccttcttaaccgtacagttgccatgattaataaatatttcggtggcgatgttccagcttacgttgaaaatgtcacagcatttgatgctgatttggcaggtgttgtcgaagaaaaactcgctgaataccataaacaaatgaatgctgttgactacccacgcgcacttgatgcgatttggagcattatttcacgtacaaataaatacattgatgaaacagctccttgggttcttgcaaaagatgacgctaaacgtgatgaactggcagcagtaatggctcacttggcagctagccttcgtgtggtggctcaccttattcaaccatttatgatgacaacatcaaacgctattatggaacaacttggtctaggaagtgattttgaccttgaaaatcttacccttgcaggcttcccagaaggtgttaaagttgttgccaaaggaacaccaatcttcccacgccttgacatggaagctgaaatcgactatatcaaagctaacatgggtggagcagcagctgcgacagaagaaaaagaatggaatccagcagatgttgagctaaaaaatgaaaagaaagctatcaaatttgatgactttgacaaagtagaaatccgtgtcgcagaagtcaaagaagtatcaaaagttgaaggttctgaaaaattgctcaaattccgtcttgatgctggcgacggggaagaccgtcaaatcctttcaggaattgcaaaattctatccaaatgaacaagagctcgttggtaaaaaattgcaaatcgttgctaatctgaaaccacgtaaaatgatgggcttgcttagtcagggaatgattctatcggctgaacatgatggcaacttgactgttttaacagttgacccaagcgtaccaaacggtagccaaattggttaatagttgtcacaaaagataatgaaaatactcagtacctataatggtaactgggtatttaacttgtctttttatgaaaagaaattcgcaaaaaatgaaaataaatttcaaaaatgacaattaattttcatttaagtttcctttgataatttttaatggcgaattttattatggtgaattagaatcgagaaaaacaaacatgactttaaaaatcttatcacgagaagattatgaacaagtgagtgccacatttaaagaacgttcgtttatgcaatctgttgaaatggcggatttgcttgaaaaacgtgggtttgacattacttttctaggtttggaagcagacggagctatccaagtggcgggtattttgtacagcatgccgatgacaggcggacttcacatggaaatcaattcgggtcctgcttcgacagatacggcttatctgactgaattttacagagaattacaagcttatgccaaggaaaatggggcgtttgaactgattgtcaagccttacgatacttatcaaacatttgatagtcacggtgagccaaatgacgacgaaaagcctgaactgattacgtgtctgacagaacttggctatcactttgatggtctgcaaactggttatcctggtggcgagccagattggcattatgtcaaagatttgacaggattgacacctgaaacgcttcgcaagtcatttagcaaaaaaggacgtccgctagctaacaaaacaaattcttttggtattaaagtgcgtcgtctagagcgtgatgaactccacatttttaaagaaattacagcatcaacttcagaacgtcgcgaatacgttgataaaccgttagattattatgaagctttttacgatagttttggtgataaatgcgaatttatgattgcaacgattaatttccaagattatcttaaaaatcttcaggctagccatgaaacgattgcttctgaactagctgttttaaatcaaaaaattgctgacggtgttaactcagctaaggtcaataaacaaaaggcacaactagataaacaaattgcaacctttgatgttcgtatcaacgaagccaaagaattaattgaaaaacatggttcagaagatgtggttttggcaggtagtctctttatttacacaccgcaagaagctgtttatctctttagtggctcttatacggaatttaacaaattctatgcacctgtcgcccttcaagaacacgtgatgacagaagcattaaatcgtggcattcatttttatactttccttggtattcaagggattttcgacggtagtgatggtgttcttcgtttcaaacaaaactttaatggctatattgtccgcaaaatgggaacattccgttattatccacgtccaatgctacacaaagtaatcacgcttttaaagaaaatcttaggacgataacctatgaaatcaatctatattagataggtttagactggagaaaaagtttttttctgatactttctttaacttcctcgcttttttatttctaggctcagacctcaaaccatccacttgatggtttgagccgtcggcaagttcaatagtccagtggactgttgaaggaatccaaggaattcctaagagtcgcagtggttgactggcagttctcattttgcttcgcaaaattgcgaccaacctagtcaactgtgcgggggtggtacaacgaactatgaatattgggattctgtacactccctcaaaacttacgaatggctgattttattaatatttcagccattttcaccacggcaggaagtatcgcttttgtgttcgctttactcacaaataattctgaaattaactagaaataataattttttgtaacttatttctaataaaaagtagctttgtcaacatctagaatcaacctatcttgggttgatttttttattttcactattttgctttacataatagtgaaaatgtattacaatgacagtaaatcaactagtttgtaatacatactagtctaaaaaagagggaggttggtatgcgcgaaacacagttgctaaaaggggtgttagacggttgtgttcttcaaatcattgccaaagaggatatttatggctatgaattggttcagcgattgaaagcggctggttttaccaatattgttgcaggaacggtctatccacttttgcaaaaattggagaagaaggaaatgattacgtcatgcatgaaaccttctccagacggtccaccacgaaaatattttcaaataacggtaaaaggagaagcgtatttagcagatttttgggatgaatggcacgatttggttcacaaagtgtcacaattggaggcgaaaaagaaagatggaagagattattaagtcgtattacacggaaactaagaaagttttggatagcttatctcagtcaaatcgagagtattttgaaaaagttgaagattacatgattttttcaggcatattttatgatgaaatttcactgagaaaagtgattttgcaaatggctcttgatttaaaagatgctgagcaagatggtctgacagcagtggaatattttggagacaatcccaagaaaatggtagataatgtcatttgtgaggcgaaagtcgctacgagaatatcacaaataagcttgtttactattttcattggggtgatttgctattgtcactttttgagtgatttttcttcagatggtttggtaacgattaacgtttttgaatacctaagtagtgttgtttttggatttgttgttatggctgtctttttgactttttacaagcaaagcatttatgggctgacattgcgtaaagataagttgggtagctatcttacgattgtagtcatagcagcgcttattattgcccttgtttacctgtttgaccgattcagaatggtatttgtcggaccaatttataccttctcaacgcttgtgagtatcgtgatagctagcattttggtgattggtggcttgtttttggtgaccagaagaaaactatttcgagtatttataccagtaatcgttggctactttttggcaggcattttagcgctagtcattaacacagcaggcattcaacataacgtgctacaatttgctccaatcatcgttatttgccttagtttactggtatttctaatcatgtctcgattactaatttttaaatgattttatcaattgcaacgagcttacgagctcgttttttgatatactagacttagtaaaatcaaggagaaagaaatgacttttgaagaaattttgcctggtttaaaggctaagaaaaaatatgtccgcacaggctggggtggcgctgaaaattacgttcagctatttgacacgcttgagcaaaatggcgtggcattaccagtgacaccgtattttctcatcaacgtttcaggtgacggtgaaggcttttctatgtggtcgccgaccccatgtgacgttctagcgactgattgggttgaagtccatgactaaagttctcatcacaggcgttagttctggcattggactcgcacaagcacgactttttttgaaaaatagctgcgcggtatatggcgttgacaaatcgcaagcgcctcagattcaagatgacaactttcatttcttgcagttggacttgacgacggatttagctgcgctgtacgattttgttcaagacgtggatatcttgtgtaacaccgctggaattctcgacgcttacaagcctttgcttgaagtatcagacgacgaattggaacgtgtttttcagaccaatttctttgcgacagtcaaaattacacgccactacttagccaaaatggtggaacgaaaatctggtatcatcatcaacatgtgctcaattgcgtcatttatcgcaggtggtggcggagcagcttacaccgctagtaaacacgctcttgcaggcttcacgcgccagctggcacttgactatgctaaggataagattcaaatttttggtatcgcaccaggtgcggttaagacagccatgacagctagcgattttgaacctggaggattagctgactgggtagcccaagaaacaccaatcggacgttggagtaatcccgaagaaatcgctgatttgacagaatttttagcatcaggcaaagcaagctccatgcaaggcgaaatcatcaaaatcgacggcggctggagtttgaagtagttattggttatttgcgagcgtagtaaatagcatatttagaaacgagattttagcaacgggtagataaacaattcggcattgcttcaaaggtagaacaatgaaagggaggcttcaaaatgaagaggagaaaaccatagtgggaaattctgtcaaacggattgtaagaagaagtaagacagaaaagaataggagataaccatgaacgcacaagaactttggaacaagtataagaaaatcaatccttcaatcggagatgacattgacgcttggcaatttgggctagaagctgatttgttagcgaagctagtccttgagggcacaaaaacggcgacggcatcagcctatgacttatatgctgttgataatgacccgctacctgaagttgggtcttatgatgtgattttagatagcaaagaccaagcagtttgcattattcagattaaaaaagtctctgttgtaccttttaaagaagtctcggagaagcatgctttcaaagaaggtgagggtgataaatcgcttgcttactggcgagatgttcacgaagcatttttcaaaccctattttaaagaatgtgggttgacattcacaccagaaagcttaatcgttttagaagaatttgaagtggtttatcccacagtttagcaaatacgtttagcaaatacgataggaggaaattcatgaaattagccattttaggaacaggaaaaattgttgacgaagtgttacccgttttaaaagaaatcaatggcattgagttaagtgctattttatcaacaccacgaagtcttgaaaaagcacaaaaactcgctgaaatttacggcatttctcaagcaagtagcgattatgatagcattttggcaaatccagacgtcgacaccgtttatgtggcacttccaaaccacttgcactatgattatgctaaaaaagcacttcttgctgggaaacacgtcatttgtgaaaagccatttacattgactttagcagaatttgaagacttggcaaaaatagcagagcagaacaatcgtattttgttagaagctattaccaatcagtaccttggcaattttgcagctattaaaggtaatctggctaagcttggtgatattaaaatcgttgaatgtaattattcacagtattcttcacgttacgacgccttcaaacgtggcgagattgcgcctgcctttgacccagaaaaaggtggcggagcactgcgtgaccttaatatttacaacattcatttggtaattggcttatttggtaaacctgaaaaagtacagtatttggcaaatatggaacgtggtgtggatacctcaggtatcctaatcatggattatggtcactttaaagctgcttgtattggtgccaaagattgtgcagcagagattaaatcaacgattcaaggcaataaaggctcaattgctattatcggcgctacgaataccttgccagaattagctttaagcttgaataatcaaagcatgacaatgattaatgaaaataccctaaatcaccgtatgcacgatgaatttgttgctttccaagccattatcgagcaagaggacatgacggctacaaaattggcgcttgagcatagccgtgccgttatggaagtcttggatgcagccgttaacagcttgtaatggttagaatgtgcaccttgattgccataaaattaagctcaaaataagtaaatgtgatataatggagtagcttgtgtgagaaaaataaaggaatgtaaccttgtttatcccacagaactactctattttttaaggaattagttatgtcaaattatgcaattattttagccgctggtaagggaacacgtatgaaatctgacttgccaaaagtccttcataaagtttctggcattacaatgttagaacacgtttttcgtgccgtatcagctttgaatccagaaaaaaatgtgacggttattgggcataaagccgaaatggttcgtgaggttttagctgacaaatcagaatttgtcatgcaaacagaacaactcggaactggtcatgcggtcatgatggcagaagatgaattggctggtcttgaaggtcagacccttgttatcgctggtgatacaccgcttatcactggggaaagcttgaaagaattaattgattttcatgttagccacaaaaacgttgccacaattttaacagcgacagccgaaaatccatttggttacgggcgtatcattcgtaatgaaaacggcgaagtgcttaaaatcgttgaacaaaaagacgcttctgaatttgaacgtcaagtcaaagaaatcaacacaggaacttatgtctttgacaataaacgcctttttgaagcgcttaaaaatatcaacactaacaacgcccaaggggaatattatttgactgatgtcatttcaattttccgcaataatggtgaaaaagtcggagcttacgtgcttcatgattttgatgaaagtcttggtgttaatgaccgtgtggcacttgcgacagcagaagacattatgcgccgtcgtatcaacaaaaaacacatggtcaacggtgtgactttccaaaatccagcagcaacttacattgatgttgacgttgagattgcacctgatgtgatgattgaagccaacgttaccctcaaaggaaatactaaagttggttcagggtctgtcttgacaaatggtacttatcttgttgatgcaacaattggtgaaaatgtcgttatcacaaactcaatgattgaacaatctgttgttaaagatggtgtaaccattggaccgtttgcccatgttcgcccagattcaacgcttgaaaaaaatgttcacattggtaactttgttgaagtaaaatcatctatcgttggtgaagatactaaagcaggacatttgacatacattggtaatgcaaccgttggaagcgaagttaattttggtgctggtacaatcattgccaactatgatggtcaacataaatttaaaacaaccattggtaacaatgtgtttgttggaagtaattcaacaattattgcaccagttactttgggagataacgctttgacagcagcaggttcaacgatttctgatgacgttgaaaaagatgctttagcgattggacgtggtcgtcaagttaacaaagcaggctatgcccttaacaaaccacaccacccaaacaataaaaagtaagcatattttaggaggtttaaatcattaagctgtactctaaacatgggcaatttttgcttatatttaggggacagcattaacttgatttgatctcttttttatgattttttagagacattatggcaattaaccgtgtaagaatggcatttcttgctattttgtagtaaaatttaatttggaaatatttttagggagaatgcttagtatggattttgaagaaaaaacgctcaaacgaacagagatttttgatgggcacatttttaaagttgttgttgacgatgtcgaattaccaaatgatttaggtcaagctaaacgagaactcatttttcaccgaggagctgttgctgttttagcggtgactgatgagaataaaattattctggttaagcaatatcgcaaggcaatcgaaaaaatttcttacgaaattccagcaggcaaactcgaaattggtgaaaacggctctgaacaagatgccgctgcgcgtgaattagaagaggaaacaggatactctggcaatttaaaacaaattcatgagttttatactgctattggtttttgcaatgaaaaaattaagctatatcaagcaactcatttgcaaaaagtgccaaatccacgtccgcaagatgatgacgaagtcttagaaattcttgaattaacctatcaagaatgtatggatttggtgaaatctggagctattgaagatgctaaaacaatcatagcccttcaatattatgctctgcattttggaggatagacaaaatgggaaaaccacttttaacagacgagataatcgaacgtgctaaccgtggtgaaattttttatgatgaccagtatctagaagatgacgaggagacaaaagttatccgtacagacctttatgacaccattgtgccatatgaagaagaggaagaaaaaaaccaaggatttctggataaatggaaagatcgtaagaaaaaagaccaatacgtttataaaagtcgtcgcattgaaaatgctaaacgtagcaagtttcaacgaaaacttaatctaatcatgtttgtggttattgttttattgattgcactctttttcgcggtgtttaatctctaattaaaaaagttaagaaggagtaagcaagagttagaaaactaacttggagaatcatcttagttgaaaactcttgtatttttgtgatgaaaattggaattattgcagcaatggagcaggaattaaagcttcttgtggaacatttggaaaacaaagttgaacatcaagttctagggaatacttattatgaaggtaaacttggaaatcatgatgctgttcttgtccaatcaggtgttggaaaggtgatgtcagcgatgtctgtagctgttcttgccgatcattttggtgttgatgctcttattaacacagggtcagctggtgctgttgctacgggtttaaatattggtgatgttgtcgttgccgataaattagtttatcatgacgttgatttaacggcttttggttacgattatggtcaaatgtcaatgcaacctctttactttgagtcagacaaaggctttattgacacttttgaacaagtcttaaacaaagctaacgtcgctagtaaaattggtttgattgcaactggagattcttttatcgctgggcaagataaaattgatgccattaaagcagcatttccagaagttcaagctgttgaaatggaaggtgctgcgattgcgcaagctgcccacagtttgaacaaaccatttatcgttgttcgtgccatgtctgacacagcagcccatgatgccaatattacatttgatgaatttatcatcgaagctggtaaacaatctgccaaaattttaatggcatttttagaaaaattagcataataaaatgggagtgaaacaaataaaatctccagtggagattttattcatgagcctagaaattaaagagcgaatcggtaatttcgaagaaattcgattttcagcaagtcttaatttcttgttgctgacctaaaacggtctatccccagaccgttttactctcacccccgcacagctcaaaagctttggggaagcttttgaggttggaaatgaagtcaagcgttgcttgatgtcaaaagggttgtaaaagctgatttatcagcgcattagaacccactcaaccactgcgttttgcttattacaactatataaataatgaggttaggcacttttgtccaaacctcattttttcatcacttagtcaactttttcaacataaatttgttcagcaattctttctgggataaccaattgtcgtgagtggtaggctagtgtgtgcgttttggcataatcatctacttttaccaactcgacaacatcattaatggctaattcatgttcttcaaggtagtttagtaaatgagcttcgtcgtgtgttcgactgattttgtaaatacctaatgtttcaatttgactgagcgtttgatgatgaatttctactaaaaagtcacccttttttggaattgttccaccgtgcggacaaaatgcgggaaaattaagattttcttccaaacgatcgataaaaatggtagaaaccgtatgttctaaaacttcagcttcttggtgaatttcatcagcattgtaatgaagatggttggctagaaaaacttctatcaaacggtgttttcggtaaagttctgaaaccaaaagcaatccttttttggtcaggtagtagccaagctctttatctttgacaatgaggtcctcggcaatcatttttttgaccatttcagaaacagctggcgcagatactttcattaattcagcaatgcgtttgttcgtgattttagttctggtttctccaagttcatgaatacattttaagtaatcttctttatttggcgtcatatcgtctcgctttctgttcttatattatagcaaaaaatctgtttttcttgggagatttggcgttttagcggaatgattttaataaaaaggcaagcaaaaaaccaaggcaggctatcctagcttgattttttaattatttgaggatcaattcattaatcaaaatcgtagtctttcacgacctcaatgcttgtgatggtaacgtcagtcgttggtttatcattgtcatcagtgtcaaccgcagcgattttatcaactatatccatgccatcaataacttgtccaaagacagtatagtttttatctaagcttgggttaccgccgttagcataagcatcaataatcgattgaggataattatctgatgagagttggcttgattggtcatctgaattttggttgatgaaaaattggctaccgttggtatcagcaccagcatttgccatggcaagagcgccacgaatattatagaggtagggtgagatttcattgacaaatccattccctgagtcgatactcttgtctttaccattccagatagattgaccacctgtgccatctccgttagggtcacctgattgaatcatgaaatctgaaatcacacggtgaaatagcagaccatcataataaccgtccttggcgtgtgtgaggaaattctcgaccgccaaaggtgcgtattttggaaagagttttaaggtaatatctcccatagaagtgtgcataataacttctgcttcgtcatctgcgacgtctgttgataattgaggaaaggcagattggtcagcactcaaagctttctttaattctttttggtaagcttttgatgaggatgcgctggcgcttgctgaagcagaagcagcagcttctgaagaactagccgctatttttgcatcgacataatcatcaccccgaatagcgcgtgtaatgcttttacaaccagataaactagctaggcataataccattaatccaaaagaccaaaattttttcatgttgcctcctaaacagctcaaaatcatcaacagcttgtggatattctggtgataacacgtgtgcataatcatcatttgaaatcaacttatccacaagtttatagtaatagaagtgatattagttattccattttatcatatttttatcgaaataacctaaaagcttaaaaaatgctataataaggttatggcaaaatcaaaaagtagaaaaaaaggtcgtaaatcacggcgaccaacaaaagcagaaataaaaagacagaaagcactgcaacgttttattttggcaattgtgacagctgttatttttttctttgcgattgctcgtctaggaatttttggcataacagtttacaatatcgtcagattcgtggtgggaagtttggcttacttcctaatgtttgcggtacttatctatttaattggatttaaatggtttcataaacagacagggcttgtcggtggttttgtggtgacaatgattgggttgttgcttgaatggcatgcttacctattttcattgacagcttatcgtgacaaggaagtcttttcaacaacagcccgcttgctttatggtgatattattaattttaaagtaagcaagtttgtcggtggaggaatgcttggtgctgttctttataaacccgtagcctttcttttttcaaatgttggcacatttctgatcggggcgttgtttatcatcttggggctctttttgatgagtccgtgggaagtttacgatatcgtagaattctttaaagaaaaatcccaagaatgggctgctaaaaacgaaattagaaagcaaaaacgttttgtaaaacgagaagagaaaaaagcacttgctgaacaaaaacgtcaggaaaaagctcagaaagaggaagaagaacgcttggctcaaatgactgttgaccaagaaacaggagaaattttagagaatcctactgacaatgagacttcgctatttgataatcttccagaaaatgacttacctactgaacctgaaattttggcatatgaccacactttggacggcctagaagaaccgccacttgaagattatccgacaatggattcggcaccgtcgcaagaagctgcgcaagctatgcttgatgaagaagatgacggcgaaccgttagaagttgatttcacagcaaaagcaaatcttctttataaactaccaacgattgacttatttgcaccagataaacctaaaaatcagtctaaggaaaaaaatctcgttcgcagaaatatcaaagtcttagaagatacgtttaatagctttgggattgatgtcaaagttgaacgtgcggagattggaccgtctgttacgaaatacgaagtcaaaccagcagttggggtgcgtgttaaccgcatttcaaatttggctgatgatttggcacttgcacttgccgctaaagatgttcgtatcgaggcaccaattccaggaaaatcgttggtcggtatcgaagttcctaactcagaaattgcaacggtaaccttccgtgaactttgggaacaagcaaatacagaccctaataaattattggaagtgccacttggtaaggctgttaacgggacagcacgtacttttgaccttgctcgtatgccacacttgcttgtcgctggttcaacaggttctggtaaatcagttgccgttaatgggattattgcaagtatcttgatgaaagctcgcccagaccaagtcaaattcatgatgattgaccctaaaatggttgaattgtcagtttataatgatattccgcatttgctaattcctgtagtaaccaatccacgtaaggcagcaagagcacttcaaaaagtggttgatgaaatggaaaatcgttatgaactctttagtcattttggggtgcgaaatatcgcaggctacaatgctaaagttgaagaatttaatgcgcaatctgagcaaaaacaaattcctttaccattgattgtagttattgttgatgagttggctgacttgatgatggttgccagcaaagaagtggaagatgcgattattcgtctagggcaaaaagcgcgtgctgcgggtattcacatgattcttgccacacaacgtccgtctgttgacgtcattagtggtttgattaaggctaatgtgccatcacgtgttgcctttgccgtatcatcagggacagatagccgtaccattttggatgagaatggtgctgaaaaacttctcggtcgtggtgacatgcttttcaaaccaattgatgaaaatcacccagtccgcttgcaaggctctttcatttctgatgatgatgtggaacgcattgttggcttcgttaaagaccaagctgacgcagattatgatgatagctttgacccaggtgaggtttctgaatcagatttgaaatctggtggtggtggcgcccaagaaggtgacccactctttgaagatgccaaagctttggtacttgaaacacaaaaagcaagtgcctcaatgctccaacgtcgtttgtctgttggatttaaccgtgccacccgtttaatggatgaattggaagcagcaggtgtcatcggaccagccgaaggaacaaaaccacgtaaagttctgatgactaacccaaatccagaagcataataaaaaacgttagctcaattggctagcgttttttatgtaatcgtaaaaattaaaatcagtatcataatgtaaaagagaaaagtcaaaataaaaccagagcgccagaaaaatttcccaaaacggcggtaagaaaaagaatgatctctcctaagaaaagttaccgttaaaataatagcgagtagtgacagacaaatcaaataataaaagaaaatactactccctaaaaatttatttcccaccaatccgatttcaaaagcaaaaatcggaaaagcaatgtcggtaaatagaatgccaaaacgttttaatttgaaaaatgtcactaaaatataagcaaaaattggtgtcaaaaacacaaacgagaaagaaaataatttgtacatcatcatactttatattttatactgaaacctaaaagatgtaaatgattagaggacttttcctaaaatttagtttgactttctttgtcagtaaaaatggacgtcgataatttaacgtggaatggaaatagattattaggaaaatcaatagtgcctgacgaaaaaatagcttgaaagtgcttaaatttgatagcagttaataaaagttgtcaaatcaaggatttttaagaaaataaatgcaataaattccttgctttttcctaaaattaatgtataatagtaaggtatgctattgagcatatctgtgggaggtaaaaatcttaattaccgccaaaaccacaacaggaggattttataaatggctaaaaaagtcgaaaaagttgttaaacttcaaattcctgctggtaaagctacaccagctccaccagttggtccagctcttggtcaagcaggtattaacatcatgggattcactaaagaatttaatgctcgtacagctgatcaagctggcatgattatcccagttgttatctcagtatatgaagataaatcatttgatttcgtaactaaaactccaccagctgctgttcttttgaaaaaagctgcaggtgttgaaaaaggttcaggaacacctaacacaactaaagttgcaacagttactcgtgcacaagtacaagaaattgctgaaactaaaatgccagacttaaacgctgcaaatattgaatctgcaatgcgtatgattgaaggtactgctcgttctatgggattcactgttgttgactaatcaatagcaacccaatctgtgattaattgaggtaaccacactgtaccgttgagattaattcacgttagacccgcaagacttcatcgtaatttgatgagtgacgtgggagattttaaatcaaatcgatatgaccacattacaaggagaattttaaatggctaaaaaaagcaaacaaatgcgtgctgcacttgaaaaaatcgacagcacaaaagcttacagcgtagaagaagctgtagctcttgcaaaagaaactaatttcgcaaaatttgatgcatctgtagaagttgcatacaaacttaacattgacgttcgtaaagcagaccaacaaatccgtggtgcaatggtattgccaaacggtactggtaaaacacaacgtgttcttgtatttgcacgtggtgctaaagctgaagaagctaaagctgctggtgcagacttcgttggtgaagatgaccttgttgctaaaatcaacgacggttggcttgactttgacgtagttatcgctacaccagacatgatggctatcgttggacgtcttggacgtgttcttggacctcgtaaccttatgccaaaccctaaaactggtacagtaactatggacgttgctaaagcagttgaagaatctaaaggtggtaaaatcacttaccgtgctgataaagcaggtaacgtacaagctatcatcggtaaagtatcatttgatgcagataaattggttgaaaacttcaaagctatccacgaagttatcgttaaagctaaaccagctactgctaaaggtacatacatgactaacttgtctatcacaactacacaaggtgtaggtatcaaagtagatccaagttcattctaatgtgatgatacaatagaaaatccgtttcactgaaacggatttttttatggactgtgtgaatgacgtagaaagcaaaaaagggagcattttgtcattgtaacatcatgattttgaaaccttgaatctttcaaaattcagagaattttgctaggtaaaacaggtaaattatgataaaatagtaaagataaaagaaggagtaacttgtagtggaacctaagtataaacgtattttaattaaattatctggtgaagcgttagctggtgaaaaaggtgtgggaattgatcttacaaccgttcaaactatcgcgaaagaaattgctgaagtacatagttcaggtgttgaaattgctttggttattggtgggggaaatctttggcgtggagaaccagctgccgcagctggtatggaccgcgtacaagccgattacactggtatgttaggtacagtgatgaatgcccttgtaatggctgatagtttgcaacaatatggagttgatactcgtgttcaaacagctattccaatgcaaaatgtagcagaaccttatattcgtggtcgtgcacttcgtcatcttgaaaaaggccgcattgttatttttggtgctggtattggttcaccatacttttcaacagatacaacagctgcccttcgtgctgctgaaattgaagcagaagctattttaatggcgaaaaatggtgttgatggtgtctataatgccgatcctaagaaagatgctaatgccgtgaaattcgatgaattgacacatggcgaagtcattcaacgtggacttaaaattatggacgcaacagcttctaccctttcaatggacaatgatattgaccttgttgtctttaacatgaatgaagctggtaatattaaacgtgttgtctttggtgaagccattggtacaactgtttcaaataaagctgaacaccacaaaaaataatttatcagctctgctattttccaaaaaataagaaatgaggattaataaaatctatggctaatgctattatcgaaaaagctaaagaacgctttgaacaatcacacagttcattggcacgcgaatttgcagctatccgtgctggtcgtgctaacgcatctcttttggaccgtattcaagtagaatactacggtgccatgacaccacttaatcaattggcttctatcacagttccagaagcacgtgttcttttgatttcaccatttgataaatcatctttgaaagatattgaacatgctatcaatgcttcagaccttggtattaaccctgctaacgatggttcagtgattcgtttggttattcctgcgcttactgaagaaactcgtaaagaactcgctaaagaagtgaaaaaagtcggtgaaaatgctaaagttgctatccgtaatatccgtcgtgatgctatggacgaagctaaaaaacaagaaaaagctaaagaaatcactgaagacgaattgaaagttcttgaaaaagacattcaaaaagcaactgacgaagctgttaaacacatcgatgctatgacagctaacaaagaaaaagaattgcttgaagtctaatcgaaaagaaggtgagggggtggactttccacctccttttataaaggaaagaatacatgaataatttacttgccactattatcacaggtcttgtgattgatgagaatgcgaaagcgtattttgtgcaaaaagatggcgtgacttttatgctagataaggcagaaggtgagcataagattggcgatatggtcaaagggtttgcttatactgatatgcaccaaaaagctcgtttgacaacagctgacgttgccgcaacacgtacgacttatggttggggtgtcgtgacagaagtacgtcgtgatttgggtgtctttttggacactggacttgcggataagcagtttgttgtttcacttgatgtgttgccagatatgaaagaattgtggcctaaaaaaggtgataaactctatgttcatctggacgtggataaaaaagaccgtatctgggcaattccagcgcagccagaagttttccaaaaaatggctggacctgcttacaataatatgcaaaatgaaaaattgcgcgccattgtctatcgtttgaaactatctggaacatttgtttatctcccagataataacatgcttggctttattcatccaagtgaacgttatgctgagccacgtcttggtgaagaagtaacggcacgtgtcattggttttcgcgaagttgaccgtacgcttaatttgtcattgaaaccacgttcgtttgaaatgttggaaaatgattcccaaatgattttgacgtatttacaatcaaatggtggttttatgaccttgaatgacaaatcatcgccagctgatattaaagcaacgtttggcatctcaaaaggtcagtttaaaaaagcgcttggcggcttgatgaaagcacgaaaagtcaaacaagaccaattcggaacagaattaattgacgaagaaaaatagctttgaaaaagaacgctgatgttttagaaagtgatgaatagtattttttgagcaataaaaaagccttgtccaaaaaagcttaaggttgggaattaaataaacttgctatttagttttcaggctcgagaaaaaaatgtccagtggaccgactcgttttttagtttctaggctcgagaaaaaaatgtccagtggaccgactcgttttttagtttctaggctcgagaaaaaagtatccactggacaactcgctttttagtttctaggctcgtgaaaaaaatgtccactggacatttttttgttataatatattcaccataatttggaggtcatagaatggaacgtgcgatttttgcgggtggttgtttttggtgcatggtacaaccttttgaagagcaagaggggattctatctgttcgttcgggttatactgggggacatgttgcaaatcctacttatgagcaggttaaggcgcatgagactggtcatacagaagcggtagaaatcatttttgatgaggaaaagatttcttatgcggatttagttgagatttattgggcacagacggacccaacggatgctttcggtcagtttgaagaccgtggtgataattaccgccctgttattttttatagtgatgagcgtcagcgtcaaatagcagagcagtcaaaggcagctttgcaagcttcaggtcgttttaaagagccaatcgtaacagcaattgagccagttcaaccattttatttggcagaagattaccatcaaggtttttacaagaaaaatcctgagcactatgccgaaagtagtgctattagacatcaatttttaaaggagaattggcaatgagaaaatcattttatacttggttaatgacgcaacgtaatcctaaaagtcatgagccagtagccattttagcggatttagtttttgatgatacaacttttccgaaacatactgacaattttgaaaccattagtcgttatttggaagatgaagcagattttgcctttaatcttagcgaattcgacaaaatttgggaagaatacttagcgcattaagaggtgaatcacctcttttttgtttaacaaagctggtacaatatcgtaagaaatttattctctgtgaatttgcgtgaatcggctttattttcaaactttttgtgctataatggatagcaattacgatacaaaaacatagaaatttcaagggagagtgggctatatgcacgtaggtcaaatgatttaactcaataactggcatttgataggcttttaactgacttataggtctgtttaaaagaaatcaaattttaaaatcttattttgttaataatctatgactctatggagagtctgacatattttaaggaaatttactatgtttaaaaaatcgtatcgtcataatattgctttagttggagcaagtgaatttttcgtttttttcggaatcacaagcttctggcttctctttcttagtcaacatggcatgagttttggtcaaattgggattttagaaagtctttttcatctgaccagtctcttgtctgaagtgccttcaggtgttctagctgaccgttttacttaccgcacaaatctttatttgggacgcttgatgtcaatattatcgtgtttatttatgctatttgggcaaggtaatttttggatttatgcatttggaatggtgctgaacgcatgggcatacaattttgattctggcacaagcactgccatgttatttgaatcggctaaagaagcagggttagagaacaagtttctcaaattttcgagttttgtgtctgctgttgctgaagcaacaagaacgttaggcgctgttgttgcaggtttctttgttcatggtttattggatatgacgtatgttatccaaattttcttctctttgatagtcattattttgattgctatgatgaaagagccagcgtttaagaaagaacgagaagagcctgcaagtttatcgcgtattttaaaaacggttgttcgggaatttaaagtgaatcgacacttattttattggctcatcactagtcaagttttttgtgtcatgatgtgtatgttttatttttactatcaaaatgaattagagattttgccgtcatggcagattagtttgctgatgcttatctctagtgttatcaatattggggctgtttggttggcaagtaagattggtcaacggtttaaagcagtcgctcttcttcctatcttagttgggttaacgggaatgctttacgttttagcaatcacgaaattacctctgatttatatgattatttatttgttggcagatgggctttatgctttctttttaccaatctttaataatgaccttcaagtgatgattccaagcgatgtgagagccacaatgcttagtgttactgccatgtttttcagtctgtttatgatagtcatttttccgatgactggctttttgattgactggttgggcttttcactaacatttctacttttaggtattgtattaatgcttttagctccgcttttaattttgaagcgcaatgatttgaaataaagatagttaagaaatcacgcaagtcgtgattttttacgttaaataagctataataggcttatcaaacacaaaagaaagagggactctatttgcaagagtattctgttgagataacattaaatcatcctgatgacgtattggcgttgtttgggtcaaatgaacgtcatttgaagctgattgaagataatcttggcgttattatccatgcacgaactgagcgtgtgcaaattttgggagacgatgaagaaagtgttgagcttgcgcgtgtgactatccaagcgcttttggttttggtttcgcgtggtatgctagttaatacatcagacgttgtgacagctctttccatggcacaaaatggttcaattgataaatttgttgcactttacgaagaagagattattaaagataattctggaaagcctatccgtgttaaaactttgggacaaaaagtttacgtggatagtgtcaaatcacatgatgtggtttttgggattggaccagcaggaactgggaaaactttcttggcagtaactttagcggtgactgctctcaaacgtggacaggtcaaacgtattattttaacgcgtccagctgttgaagctggtgaaagtcttggctttttaccaggggatttgaaagaaaaagttgacccttatcttcgtccagtttatgatgccctttatcaaattttaggaaaagagcaaacaacacgtttaatggaacgtgatattattgaaattgctccgctggcttatatgcgtggacgaacacttgatgatgcttttgtgattcttgatgaagcacaaaatacgacaattatgcaaatgaagatgttcttgacacgccttggtttcaattcgaaaatgattgttaacggtgacactagccagattgacttgcctaaaaaagttaaatctggtctgattgatgcaactgaaaaattacaacacattaaacagattgattttgttcatttttcagctaatgacgttgttcgtcatccagttgttgctgaaatcatcaatgcttatgaaaaagctgcaccaaaacagcgcagccattctccaaaagcgtcagaagaagctgtggctgaatcgggttttgcaagctatgaaaccattggtcaaccagctagtgataaagaagcaaatagtgattaggaaagctagattaaaatctggctttttttataaaaataattttcagatatgcgaaaatgaaagatagccataaaatcgtgctataattgaggttagtttaaaattttgaggaatgtaaaaatggtatttttaactgatataacaataaagttaacatcatctgcagatagcaggattacgggaggtagtcatgagctctcgtgaattgtcagcagaagagttgcgtaaactggctaattatctatcacaacaagctaatgacctcgagatgacactagaagctgtgaaaaaagtcgctgtgtcgtctcaagaaattgctgatgaagctgaaatgctctcaaaaatgggagaaaacgccaattatttagctaatagtgttcaaaaaattatagcgcatgaaatggagaaaatcaaaaagtgataacagagagattgcgccaatatcaaatccttgaaacagagcgcttaatcttgcgcccggtgacgttggcagatgcggaggcgatgtttgcttacgtttcagacgaggaaaatacgcgctggaattttccagccaataaaacgcttgaagaaacaaaggctgctattaaaaacatttaccttaaaacgcctttaggtcgttacggtattgtcctaaaagggacaaatgctttcataggtactattgatttgatgaatttttcagatgaaaaaatggcagagctaggctatattatcaataaaaagtattggaatcaagggttagcgaccgaagctagtcagaagctcatagcgctgtgctttgaaaaattaggattagaagaagtgcatggctattgcgctctcaataacccagcctcagcgcatgttctcgaaaaacttggcatgacagagctcgaacacataccaaatgataagatattaaacggtcaaagcatcacaagccaacattttgtcataacaaaaacaaagtggcaagaaatacaaaagtaaaactgggacgctgtctcagttttttgatttcataatgtgcttttttgagaccaatttttttgatatgagcaaaaaaatagattaaattgtctaaattttttagtttttttgttgcgttggggattttttgtgatataataaaaaagaaatatgcaaccgattgcaataaaaattaggaggatttgcctataaaacaattttaacaaccattctactttcctcaattgagcagattgtgatgtgatataagttatttagtatcatgtatttttctgcttttgtttttaataaaaaatgaaaacggttgcgtattttgtctatctttataggagattatttatggtatttcgtaataaagaaaaaatgaagaaaaagttgaaactgggattaggatctgctttgatttttacaatacttggtactggaacatttgttcaagttagtgttgttaatgctgatacagagcaggtatcgatgaaagaaggaacagtgcttcacgcttggtgctggtctttcaatactattaaggataatatgcaagcgattaaggacgctggctacactagcgttcagacgtcaccgattaatgctgttgttgcaggaaatggtggcaataaaagcttgacaaattggtattatcaataccaaccaacggtttatactattggaaattaccaattaggaacagaagaagagttcaaagaaatgaaccatgtggctgaccaatacggtatcaaaattattgttgatgctgtgcttaaccacacaacttctgattacaatcaaattgaccaacaaatcaaaagtattccaaactggacacatggcaatacccaaattaccaattggggaaatcgttatgatgtcacacaaaactcgcttttagggctttatgactggaatacccaaaacgaatacgtccaacaatatttgcttaatttcttaaaacaagccgttgcggacggtgcagatggtttccgttacgatgctgctaaacatattgaattaccaggtgaatacggtagtaatttctggaatgttatcttgaataatggttcagaattccaatatggtgaaattttacaagatagcatttcaaacgaagctggttatggtcaattgatgagtattacagcttcaaattatggtcaacaaattcgttacgctttgaaagatcgccgtgttgcagcaggcaatcttgccaattatcaagtgtctggcgttgacccagcaaaccttgttttgtgggttgaatcacacgatacttacgccaatgatgaccaagaatcaacttggatgagtgatgaagacattcgtcttggttgggcaatgattacagcgcgtgccaaaggtaccccattattcttctcacgtcctgtcggcggaggaaatggtacacgctttacaggtcaatcacaaattggtgatgcaggtagtgacctttataaagatgcaacagtagcagctgttaataaattccacaacgctatggttggtgaatcagaatacatccgtaaccctaacggagacgaacaagttgctatgattgaacgtggaagcaagggggctgttattgtcaaccttgtcagcggcgacaaatatttggattctgaaacaaacttggcagatggtacttacacagaccaagtttcaggacgccagtttaatgtttcaaatggacgtatcactggtagcgtaccgtcacgttcagctgttgtgttgtatgatgcaaaagacgatgaaacagtttcagcatcaattgatggttacaaagaaggtaacaattctatttcagcagcaacagaagtgacattgaaagctaaaaatgcgcaaacagcaacttataagattgacaatggtcaagaagttgctttccaagacggtgataaaatcacagttggtgaaggtcttgaagctggtcaatcaacaacggtcacagtcagtgcaactggtgcagatggacaaacagcaagcaagagttatacattcaccatgaaagatccgaatgctgaaacaaacatttacttccaaaatccagataactggtcagatgtttatgtttacatgtataatgccacaaatacccaacttcttggtgcatggcctggaactaagatgacaaaagattcatcagggcgttatacaatttcagttccagcatcatatgagacagaaggtgtcaaagtcctctttacaaacaatagtggtgcacaatatccacaaaatacaggatttgattttaaagcagaaggtgtttattctaaagacggtttagttgcagatgttcctgaaggaatgacacgtatttcatttgataatcctggtggttgggatagcgcaaatctctatgcttattatggtaatccagtccaaatgccatttggtgcgtggcctggtcaagccatgacaaaagatgctcaaggtaatttctatattgatctcccagaggaataccttgatttaaacgttaaaatcatctttagccaacctggtactagtaaccaattcccagctagtatcggctttgatttggtaaaatcaggcaattataacaaagatggtttgaaatgatgataggacttctgatgagaactagtccttaacactcctccttgaagaagtagctttaccccgagctacttcttttttatgagaaaatcaatcttgctgtcagttaaaaaataaaaaatgacaaaagttgacctgctaaattcttgagatagcggggatgagtgttgtaaagcgtacagtagcgggctttattttattatggtataatagccttgatataattagtttgaaagaagatttatatgtacgttgaaatgatagatgaaactggtcaagtttcagaagcaataaaaaaacaaacccttgatttattacaatttgcagctgaaaagacaggtaaagacaataaagaaatggccgtgacttttgtgacaaatgaacgtagtcatgagttgaacttggaataccgtgacacagaccgtccaacagatgttatcagcttagaatacaaaccagaatcaagtctgtcattttcagaagaagacttagaagaaaatcctgaactggctgaaatgctagatgaatttgacgcttacatcggtgaattattcatttcggttgataaagcgcgtgaacaagcagaagaatatggacattcatttgaacgtgaaatgggcttccttgcagtacatggctttttacatatcaatggttatgatcattacacccctgaagaagaaaaagaaatgtttactttacaggaagagattttaactgcctatggactcaagagacaataattcacctaaaaagtggaaaaatcgcacgttagtagcgagtatggaatttgccattacaggtattattacagccttcaaagaagaaagaaacatgcgcaagcatatggtttcagctattttggcgagcatagctggcgctgtttttcgaatttcggcgattgagtggctctttttgctactggcaatctttttagtcatcacgtttgaaatcattaattcggcgattgaaaatgtggtcgaccttgctagcaattaccatttttcaatgttggctaaaaatgctaaggatatggcagcaggtgcggttttagtcatttcaggctatgctgttttaacaggattgattatttttgtaccgaaaattattgccttgatttttggtgaatagccaaaacttagttagagagaattgaaaggagtagggcgtttaacgtcctttatatcttatgtttaaatcaggttttgtagcgattttaggtcgcccaaatgttggaaaatcaacatttttaaatcatgttatggggcaaaaaattgctatcatgagtgataaagctcaaacaactcgtaataaaattatgggaatttacacgacggatacggaacagattgtctttattgacacacctgggattcataagcccaaaaatgcacttggtgatttcatggtggaatctgcttacagcactcttcgtgaagttgaaacagtcctttttatggtgcctgctgatgaaaagcgtggtaagggtgatgatatgattatcgagcgcttgaaggctgctaaaattcctgtcatcttagtcattaataagattgacaaagtgcacccagaccaacttttggaacaaattgatgatttccgtagtcaaatggatttcaaagaaattgtgccaatttcagctcttcaagggaacaatgttgaaacattgatgaacattttgaaagataatttggaggaagggttccaatatttccctgaggaccaaattactgaccacccagaacgtttcttggtgtcagaaatgattcgtgaaaaaatcttgaaattgactgaacaagaagtgccacattctgttgcggttatcgttgagtctatgaaacgtgaccctgaaacggataaagtgcatatccgtgcgacaattatggttgaacgtgatagccaaaaagggattattatcggtaagcagggggcaatgctcaagaaaatcggtaaaatggcacgtcgtgatattgaaatcatgcttggtgacaaagtttaccttgaaacatgggttaaagttaagaaaaattggcgtgataaaaaacttgaccttgctgactttggttacaacgagaaagaatattaagcgtagcctaggtagctttgtcaaaaataacactaaaacagagtgtttgcttaaaagcagcactctgttttataataagcgtagaaatgctcaatcaagaattaaatgaattttagaaaggagagggattcgttcgtgttacttcgaacacggattaaaggctgtccctctattcttgaaatgatgtttagaaaggaaaggcgagaggttctcaattgaacccgagcggaaaagctagtgaaaaagatgatgcgactggaaaatcaggattttccgcctcatccttatttgttaaattttgtttagaaaggagtgccaagcggttggttgactagaactcgcctacgactctttgaaaaaagataatctttcctaggtgtcttatcaccttcgtcaagattcctatttgttaaattttgtttagaaaggagagaggattcgttcgtgttacattgaacacggactaaaggctgtgtaaaatagacaggtcatttcagaaatcaggatttctgatgacctcctaattttactttgccttttacgtcctttgtatcagaaatatgcctgaattacctgaggttgagacggttagacgtggtttggagagtctgattgttggtcgaaaaattgtagctgttgatgttcgtgtgcctaagattgtcaaaacagatttggtggcgtttgagactgagattttggggcaaacgtttcagaatattggaaggcgtggaaaatatttactattaatgttgaataagcaggtgattatttctcatttgcgaatggaaggtaagtatttgctttttccagaacaggtgcctgataacaaacattttcatgttctttttcaacttgatgatgggtcaacgttggtttatcaagatgttcgtaagtttgggacaatggaattgttgtatccaaatcagatagaagcttattttcaaaagaaaaagctcggtcctgaaccgacaaaggaaacatttgacttatcagagtttactagaaaattgaaggcttccaagaagattatcaagccttatcttttagaccaaaccttggttgtggggcttggaaatatttacgttgatgaggcgctttgggcagcgaaaattcacccagagcgtgtcagtttaagtttgacagattcggaaatagctttgttgcatgacgagattattcggattttacagttaggaattgctaaaggtggaacaacaatcagaacgtatcataatgcctttggtgaggatggcaatatgcagcagtttttgcaagtttacggtaagacgggcgaaccttgcccacgttgtgcaacgccaattgaaaaaatcaaagtaggaggtcgtgggacgcatctttgtcctgcatgtcaaaaacgatgacaaaaattattggaatcacgggcggaattgcttcgggaaaatcaacagttgtggctgaaattcgaaaacagggctatcaggttattgatgcggaccaggttgtgcatgaattgcaagaaaaaggtggcaagctgtatcaaactttagttgaatggcttggaaataacatcctgcaagaaaatggagagcttgaccgtcaaaaattaggacaagttatttttggaaataaagagatgatggcaaaatcatcaaggttgcaaaatgagattattcgccaagaattagctaatcgtcggaatcaattagcccagacagaggaagtttttttcatggatattccgctgttgattgaacttgattatatggattggtttgatgaggtctggttagtttatgttgatgaaaagacgcagttagaccgtttagtgatgcgaaatcattacacgcgttctgaagcacaaaagcgcattgcgagtcagatgtcaacagaagctaaaaaagcttacgctgataaattactagacaatcgtggtaatctacaagcgctaaaagagcaggttgaccgattgttacacacattatcggactgatttttagctttatttttagtgattaaaaaacaatacttgtataggcaactttctttctcatttgactaatattgtgctataatatcaattgacgttttttagaaaagagggtgaacaatcattaacagcgaaattaattggaaacagaacttgcgggtagcttggcttggtaacttttttactggggcaagcttttcacttgtcatgccttttatggctttatatgttgaacaacttggagcacctaaaaataaggtagaatggtatgctggtctagcggtgtcactatcagctttaacttcggctcttattgctccagtatggggacgtttggcagaccgttatggtcgtaaaccaatgatggtaagagcgagtttggtgatgacttttaccatgggtggtttagcttttgttcctaacgttttttggttattagttttgcgtattttgaacggtttgttttctggctatgtccctaattcaacagccttgattgccagtcaagctcccaaaaatcgttcaggttatgcgcttggaacactagcaactggtgttatcggtggtagtttggtaggaccgttattgggtggtgttcttgctgaaattttgggcattcgtcaagtttttcttttggtcggctttattttattgatttgtaatctgatgaccgtttttcttgttaaagaagattttcaaccagttactaaggcagaagctctatcaacacgtgagctattctcctcaattaaagataagcaaattttaattggtctttttgtgactagcatgattatccaagtatcagcacaatctattgccccaattttgaccttgtatattcgtcatcttggtcaaacagagaacttgatgtttgtctctggtttgattgtatcagcactaggattttcaagcatgctctcaagctcgactcttgggaaaattggtgatagaataggtaatcatagattacttttgattgctctattttatagctttagtatgtatgtgctttgcgcccttgctcagaattcattgcaattaggtattgtccgcttcttgtatggttttggtacaggtgcgttgatgccgagtatcaattcattgttgactaaaatcacaccacgcgagggaatttcacgtatttttagctataatcaaatgtttatgaatatgggacaagttattggaccttttattgggtcagcaatcgcaactggtttgggatatcgttcggttttctacgtgactagtcttattgtctttgtaaactttgtctggagccttattaattttagaaaatacttaaaagttaaggaaatcgtgtgagaataaagattaatttaaaatgcagcagttgtggcagtaagaattatttgacaagtaaaaataaaacaactcatccagagcgtattcaggtcttaaaatattgtccgaaagagcgaaaagtgaccttacatattgaatcttagggatttttatgttagaataatcaagaccatagtgtaggaaaggaatagaactcagactgaaagtgtcaaatcatgaccaattcaattgatttgaaaataactttctgacgcgttcttagtgaaaaagatgtacaatatactactgacaactttgctggtattatctgttattattgtgattgctattttcttgcaaccacaaaaaaatccaagtagcaatgtatttgataacagcggttcagaagctttgtttgaacgtactaaagcgcgtggcttcgaagcgtttatgcaacgttttacagcagttctagttttcttttggctagcaattgctttggcgctagcgattttatcaagtaaatagatagcaactaacgaggctaaatagtggcttacgttggctgcgcatcttgaattttgtacgaaaattcatgggctggtcactcagctcattttttattatgaagtcgtaaaagtcttgtttacgacctgttagaataaagtagaatacgagaggaaaattattgagttaagcctagctgggcattttatgtctgatttttactaggaatacttacaatcacaaattatgaacgaaaaaattattgcttatttagaggagcatggaaaagtcaatattaatgaattggctgctgggctagacatggctggcgctgaaaaatttccaaagcttatcaaagagatttcaaaattggaaagtcaaggaaaactgcgttttgatgatcatggaaaccttgctcttcgtaaaaaaatagagaagaaaaaagaaatcaccgttacgggtgtttttcgtgctaacaaagctggttttggttttttagcggttgacgaaaatgaagatgacatgtttgtcggacgtaatgacgttggtcatgcggttgacggagatacggttgaagcggttgttaaaaagccagctaatcgcttgaaaggtacagcagctgaggttcgcattgtcggcattgttgagcgtagcttaaaaacggttgttgggaaatttattcttgatgacgaaaaaccaaaatacgctggttacattaaatctaaaaatcaaaaaattcaacaaaagatttatatcaagaaagagcctgttttgcttgacggcactgagattatcaaggttgacattgataaatacccaacacgtggtcatgattattttgttggtcatgtgcgtgacatcgttggacaccaaggtgatgttggtattgatgtgcttgaagtccttgaatcaatggacatcaaatcagaattcccagaagatgttatggctgaagccaatgcagttccagatgcgccgtctgaaaaagacatgattgggcgtgttgatttgcgtaatgaaatcacctttaccattgatggtgcggatgccaaagacttggatgacgctgtccatattaaattgctcaacaatggtaattttgagctcggtgttcatattgcggacgtttcatactatgttacagaaggctctgcgcttaatcgtgaagccgttactcgtgggacatcagtttatgtgactgaccgtgtagttccaatgctgcctgaacgtttgtcaaatggtatttgttcgttaaatcctaatgttgaccgtttgacacaatcatgtttaatggaaattgaccgcaatggtcacgttgttaatcaccaaatttgtcaatcagtcattaagacaactttccgtatgacttacagcgatgtcaatgacattattgctggtgatgaagaattgattgagcaataccaaccaatcgttgactctattcatcatatgactgctcttcacaatattcttgaaaccatgcgcgtgcgccgcggtgctcttaactttgatacgagcgaagccaagattattgttaatgataaaggaatgccagttgatattgtgcttcgtcaacgcggtattgctgaacgcatgattgaatctttcatgttggcagctaatgaaacagttgcagagcattttgcaaaacgtaaattgccatttatttaccgtatccatgaagaacccaaagctgaaaaattacaaaaattccttgattatgctagcatttttggcgttcaaatccatggtacagctaacaaaatcactcaacaagctttgcaagatttcatggcaaaagtggaaggtaaaccgggcgcagaagtgttaaacatgatgcttcttcgttcaatgcaacaagcacgttattctgaacataatcacggacactatggtttggctgcggagtactatactcacttcacaagtccaattcgtcgttatcctgatttgcttgttcaccgcatgattcgcgaatacacacaactcactgatgagaaaatcgaacactttagaaatgtgattccagaattggcaacgtcatcttcaacccttgaacgtcgtgctattgatgctgaacgtgttgttgaagccatgaaaaaagccgaatacatggaagaatacgttggtcaggaatttgacggtgtggttgctagtgtcgtgaaatttgggatgttcatcgaattgccaaatacaatcgaaggacttgttcacatcacaactctgccagaattttacaattacaacgaacgtacattgacccttcaaggtgaaaaatcaggaaaagttttccgtgttggtcaaccgattaaaatcaaattaacacgtgctgataaagaaactggcgatattgactttgaatacattccaagtgagtatgatgtggtagagaaagttaaaaaatcacgcaaagaccgttctggtaaagaaaaacgtcgtccaaaagcggataaccacaaaggttcaaaatcaaacaaaccacgaaatcgtaaatcttccacttcaacttctaaaaagtcaggcaagaaacccttctataaagaagttgctaagaaaaaatcacgtaaagctaaaaaataaaactgctaattaagataatcactaattttcaagagaggtatctaatatgccaaaaggtgacggaaatgtcgttgcacaaaataaaaaagcgcgtcatgactataacatcgttgatacaattgaagcagggattgttctgacaggaacagaaatcaagagcgttcgtgctgcacgtattcagctcaaagatggctatgcccaaatcaaaaatggtgaagcttggctgattaatgtccatatttcaccttttgaacaaggaaatatttggaatcaagaccctgagcgcactcgtaaattattgctaaaaaaacgcgaaatcgaaaaattatcaaatgacctaaaaggaacagggatgacccttgtaccacttaaagtttatttgaaaaatggcttcgctaaagttttgcttggtgtggcaaaagggaaacatgattatgataaacgtgagaccatcaaacgtcgtgaacaagaccgcgacatcaaacgccaaatgaaaaatttcaatgcaaggtaaataggaaatacttacagagacttttagtctgtgataatcgttaaaagaggttggaacaataggttccaacctctttataattttcgatgagccatattgagcaaaatctcaacaaaaatcatagtgatagcctgcgtatctacaatagattgttttgaaatggaatttccaggaagagtaatgacatggttaaagtatttcgcggcagcagcgtgctcatttaatgtaattagataggagttctgtggcatattttttgagatagcacttaatgtgttattaaaattggctgacgaccctgaaatagaaaacataataagtgtatcttcttcatcaataatatttgaaagatgatttccgctgtttaaatcacttgctaattgactagcgatacctaaatcttgtaaaccaaaatgtaagtaccttgcagggagtgatgataaaaaaataccaagaatatgcagatgctgtctttttaaaatacaatcaacaagttcgtcaattgcttgacgttctaaatgtttcatttgatttagaataacgctataattatccgcaatttggtcaagaatatcttcgttttcttcttttggcttttgatgaatataattgatagcatcgtagcgaaaatctttaaatcctttatagcccaaaatttggcaaaatcgtaggacggcagatgtagaagtatgtgaatttgttgcaattctagtaattgtcaacgtttctaatttctcaaaattctccttgagaaagtgataaacttttgcttcagattttgagtattcttgttcgtggagtcgcattttttgtaaaatgttcataatcaaaatacctttctaatcaagtattttaagcgtttttgacaaaaatgtcaaaaataattataaaaaatatcaaaaatttattgacatcgctttcaaaaagaactacaatgagggtgtaaaattttacaaaataaaatgacaaaaattacaaaaaagaggttagctatggattataagaagttagcacaagaaattgtcacaaatgtcggtgatgttgacaatattcaaaccttgtctcattgtatgacacggttgcggtttcaactaaaagatgcttcaaaagctaataaggaggctttagaaaatctagaaggagtcctaggtgttgtctatgctggtggtcagtatatggttatcttagggcaacatttattgcaaacttacgatgtgatgatgaatgattttaacattacatcgggtggtagtatcgatgaaaatttggatggtgatttaactcctaaagaaccatggacgtggaagaatgcaggtagtaaaattattggttttgtatcaagttcagttaccccaatgattcctggtctgattgctggagggatgttaaaggttgtcttattattgattgtgacctttattgatagtaattttgctacttcatcaagttatttgctattatcagctattgcagatgccccattttatttcatgccaatttttgttgcttacggtgcggctaataaattaggtgccacaccaatttatgcaatggcttcggcagcagcattattgcatgggaattttacaggtttagtaacagcaggtgaccccattacgttatttggcataagtgttcgtttgctttcgtatggaacatcgcttttacctgctctactaattgctattcttgcttattatgtcgaaaaatttcttaataagattatcccaaatatttttaaggcaatttttgtcggaatgggaactatctttgtagcgggaagtttagggtttactatcttaggtccacttggaaatatgattggacaaggtattgcaagcttgtttatgttcttggaaggaactgtgggaccgattgctgtggggcttttggctgctgctcttccttggatggttatggctggaatgcataccgcattagcaccatttatgacacagttactgactaatcctggatacgatgccatgattcgtcctgcctttcttttacataatatggctgaaggtggtgctgttattggtgttacggcacgtactaaggacaaagctaaacgaggggagcttctctcgattgctattggttgtatcgtggcaggtgtcacagaacctgcaatttatggggttaacttgaagtacaagaaaccaatgtatggtgttatggctggtggctttgttggtggtatcgttgctggtattcttggtgctaaagcctatgaaatggggtattcaaatattcttgctctaccaatctttggcaaaactgttttagcagctgttgctggaattattgtggctattgttgttgcagcggttgtaacttatctacttggaattgatactagcaaagaagatgctaagttgactgtcacggaacctgttcgtcaggttgtaccagatgatgctatccttgcgattgctgatggtgagttggtgccattagaaaaggtgaatgatgaagtatttgctcaaaaattaatgggagatggtattgccttcaaaccaacaagtgattttatcacagcgcctgccaatggtgaattaacaactgtctttccaacagggcatgcgtttggcgtaacacgtcctgatggtgttgaactattggttcatattggtattaataccgttgagctaaatggagaaggctttgatgttttggcaagagctggtgatagtattcgcgcgggtcaaccgattgtgagaattgatcgagacaggattaatcaaaaaggttatgatacaacaactatgttaattattacaaatgctaatggaaaaacgattgaactacctcaaatgggtgatgtgaagcaagggcaacgtttggataaggaggaaaactaatgtcatacgaattaccaaaagggtttctctggggaggagccacagcagattttcaatatgagggtggctttgacgaaggaggacgtggtttactttcacatgactatgaaacatatggttcacaagaaaatccacgtcatcataccatgcagatgccagatggtagcattatcaatccgcgtagctcatttttctatgcagatcctgttccgaaagaagcacagcctgtctttttagaagatgaatattatcctagtcatcgtgcagttgatttttatcatcactataaggaagatattgctttgatggctggcatgggatttaatgtttttagattttcaatttgttggtcacgtatttttccaacaggtgaggaagaaacgcctaacgaagaggggttagcattttacgatgatgtgattaatgaaatggcaaaatatggcatggaacctttaattacgatttgtcatgatgagttgccgatgcatttggcgttgaaatatgatggttggtcatcacgtcatgtcattgattgttatgtaaaatattgcaaaactctctttgaacgttacggcgaccgttgccgctattggttgacttttaatgaaatcaatgctgtgcgaggatttggtccatgtgggacacgacaatcagaagggcaagaccgttatcaagctgcccaccatatgtttgtagctagtgcgcgtgctgttaaacttggacatgaaatgatgccaaatagccaatttggtgcaatgtatgctatgagtgaactatatccagcaacttgtaagcccgaagatgtttttcatcgcttgcaggaacgtcgtgaaaattggtattttattgacattatggggcgtggttattacccacgttatgcaaaagaaatctggcgtcgtcgaggcgtgaaagaaattgtttttgctgctgatgatgaagaactccttagagaaggtcaacttgattttatttctttttcttattaccgttctaataccactaaagctggagatgactggtttaatgttggtggctctacgaatccatatcttaaagagacgccgtggggatggccagttgatcccttgggacttcgtcatgtcatgaatgagatttatgatcgcatacaaaaaccaatttttattgttgagaatggtatgggtgccattgatgagcttgatgaaaatggtattgttcaggatgattatcgtattgattatttacgtgatcatcttcaagcaatggctgacgctattatcattgatggtgtagaatgtttaggttacaccatgtggggacctgttgatttagtctcactttcaacaggagaaatgaaaaaacgttatggctttatttacgtggatatggacgataaaggtaatggcagcttgaaacgtactcctaaaaaatcctatgcttggatgaaagaaattatcgtctcaaatggtgccaagttatctgaaatttagaaagaaaaattcaatcaataatgagtgtaatcttctcttgtcattgattttataaacaaaaccagtcctgaacgtcaacattcagaactggtttttggttatacggtgttaatgaaaggttaattttctctttgaaaaggatatgtagtagttgactaaatctccttttcatcgaggataagggagtgggtttctatatttttaatcgagccatgtaatgacttcttcacgaggtttacgtgagcgtgggtgtttagggtcacgtagacgataaccaaatgataccatgcttgcgataccttcgttatcaggattaatgatgcctgcattagccaaaatgctattgactttttcgtaattgaacccttcgattgggcaagagtcaatgccaagcatgctagctgtggtcatcatatttccaagtgcgatataagtttgtttggcagtccagtcaaacaaagcgtgtggattatcagccattttcatatcatttttttggaaagattcgtaggttgctaaacggctgttaagagcatcaccttcaccgagaccacgtcgaataaggctatttttgaccgattcagaatcatagcgtgcatttttttcagcaatgaggagaacaaaatgacttgctgtatctaattggtattgagccccccaagcaacggctttgagttcatcacgaagtttttcaatttgtttgcggtcaagaacaacgaagcgccaagcttccaaaccaatagaagaagggctcaaccaagctgtatcaaggataaaatccatatcatcatgggaaatttcttggtcgttgtaaacgcggacagcaacacggtggtcaaaggcagtgcgaatttgttttttgatatcttcttttgacatagctttctccagttttctttctatgataacacttagaagctattttttctagtctttagcaaaggcaacaagtccgtctaaccaagcttggtgaccaagcatcattgtattaggaacagattttgctaattccttagcaggtgtaccaatttgagattcttgtgtcaagatacgaacacggttacggtccaatttttgaactaaccaagcatggtaaacgtcaagaaattcatcgccttcagcttcattccaaccatgccatgctaagcgtaaaacgccattttcagcatctaaatcatattcttcaacttgagcttcaacgtcaaaaccaaatgttttaaagcggaagcgtgtgtcgtttgtaagaacagtagagtcttggttatacatatgcacgtctgatgaattttcataataagtttcccatttgccagcgtcaagcagaccgtcaaggattttgtcaaagtcaaggtctttaaagacaacttcgtttgaaacaaagttatcagtcaaaccaggtgtgaatttttctggaaaattaatagataacataaaatatacctctttcatttgttaatggagatagtataacatatattagttgcacatacaactaatatgactcaaaaatattaaaaaatataaaaatcggagtttcttgctctccgattatctcaatttttctgaattgatattgatgatagaagccaagtcatcagcgtaatcatcaccaagaatagctttataacgggcatgcaaattgtcccaagcttctcggatatctggtaaaagttctctgccattgactgtaagataaacttttcgagtacgtccttcagttagtgttgtgacataacctttatagaccaatttctcaacaaggcgtgtcaaggtagaaggtgcgatataaagtatttgtgcaatatccttttgcaatctgccatcttcttccgcaagaataagaagaataaaggcataagttggagtcattccaactttttggaaagattcctccgccaatttgttgagggcacgatccagcttttttacagtaaaaaataggcaagagtcaagtgattcttgaatattttttgacatgacattctccttaatataagttttatagaaaatatgataacacacttaaatgaagaatacaaatgaggtagcttttcaaaagcgatgtcggacaattaatataacagaggctaagatatagtatcaaagcattgggagagatggttattttttctattaaaaacggtgctaaaatgcaaattatccgcataaatgcagcgtttagagagatttgaaaaagaaaatatcaagcgatttacaactattttacaacaaacgaaagagccttatgtaacgacttatagaaagttatacaaagttatggaagaacgacacttgaaattgagtgtatttttctatgctgtgaaacagcagactatttcatttctgcttgattgttctaaaacttattagtctgtgatttgtcaagggcttgttgcgtatgcaatgctgaatagtaccctttacaaaatacaggctaataagtagcttttcaaaagcagaaaagaaatgacaatgcttataacagcatgatataatgcagataaagataaattctaatttaacgaggtgatattatgaaaattgtaaaaattatattatctataacaacaatgttttttgctgtgttgggattaacgaaagttcttccatttgacatagcaaatccaattatgcttgtatcacttgctactcttttactactgagaagtatagaatataaaaatagcagagataaaagtggatttatctttacttgcttaactgcagtatttgtctatgttgtagtgatttataatgtctttataggataaacaaattccagttgatgatgttaaataaagaaaaacttaatttaaggagagatgatataatgattagaattgagaaaatcaatgcaagaaatatttgggatatattaaaactacacgtgagtaaggaacagcaatcgtttgttgcatcaaatgagttaagtatcatagaagcatatatcgcaataaccggaaatggatatgcttttccatttggtatttttgatgatgaaattcctgttggctttttgatgataggatatgatgtagatgaatcatttgaaaatccgccacaaattgcttatggcaattatagtatctggcgattgatgattgatgaaaaatatcaaaataaaggatatggaaaggaagcaattcgtttagctttagagttcattaaaacatttccatgcggacaagcagaatattgttatttgtcttatgaacctgaaaatttaaatgccaaaagactatattcaaagtttgggtttatagaaaatggtgaaatagatgagggagaaatagtggcagttttaaaattgtgatattttgataattaaggaaataagtaagcttttcttaaaaaatagagaaaacgacaaatcccagtttatgtggaaggtacgctcaaaatctcttgcaaagacggagtgatccagacacggtggcaggaaaatctctcagatttttctgccatgccttgcaagtggctgtttcacttcgtctatgagcgagcctgtggcgagcgattatcaagcccccgttatctaacaaggggggcacaaaaaacaagaaacaatagtcattacaaagcggaaacgctgtatttataaggcaaaaccacatttttgagggtgttaagtaaaaagcactcatttaacacatgaaaattgaataggaaacatgagaaaggcagttgatttcaaaaacaagagaaattgattgtctttttcttttgcagaaatttaagcaaaaggaacgtattatacaaagagatttgtatgacggtatcgacacacagggaagtaaaatgaccttatgccagttatatgccaaaaagaacgctcaaagaccgaatgtaaagcagaatacaacggtcataaataccttatgcaagccgatatactcggttctaggagcattgacagtattaaaccatctgacgctagagaatgggctatccgcatgaaaggaaaaggattttcttacaaaacgataagcaactacaagcgttcgttgaaagcgtcgttttatatggcgatcgaagatgattatgtaaggaaaaatccttttgatttcaagttaagcgaagtgattgaggacgacagcgaaccaaaggttgctttaagcgaagaacaggagcaggcattgcttgacttcatgaaacatgacaatgtttatcggaagtattatgatgatgtgctgatactgctgaaaacaggtcttagaatatcggaattatgcggattgacaaagaaagatttagattttgaaaatcatgcaatcagtgtcaatcatcagttgttcaaagataaggacggttactacatagacgaaccgaaaacaaagagcggtattcgtaaagtaccaatgagtgatgaaacggagcaggcatttcagcgagtgttgaaaagaaagcaaaaatcaaatatcaaagagatagacggttatagaaattttctgtttctcaatacaagcggtagtcctgtacacagacaaatgtatgaaaccatattgaaaagaatggttcaaaagtataacaaaacacatgaagtcaaattaccgaagataacgccacatacattaaggcataccttttgtacgagattagcacaaaagaacatgaacccaaagaatttacagtatatcatgggacattcaaatgttatgcttacacttaatctatatgctcattcatcagaggttggggcaaaccgagaaatgagaagtatgatagcatgatttacaacgaatgagggcgaagatatgcagggtttaaacccagttctgcggtagctttaagaaatgcgaaaagccgacaatccttgaaaaatagggatatatcggcaattgaggacttataagaagatacagaaaaagttgtattctttttattttaaaagtattctactaaacttagaaaacttacaaatcattttttctatgataagttaaaaaatgaaatagcaaaaaaatttcaataacttaaacaggtgtgatttttgaacataaaaaagagataaaattatctcgccgaaaataattttatctctctacgtatgtgacatgttgaatgtttaaaaatgatagttattatagcaatggtagaataacattaacccagaaccaagaaagtggcatgacgagaatcatggctggtatcatatcggcaattgggaacattttcagtttgaccatacggaaacctgtggcaagcattagaaaaccaccgcaggctttgaaatcagcaatcatatcaggtgttgtaagtggcacgatgaaggctgacaagaagaaaaggcagcagaaaatgataaattgtggaatggcaacaagtgataccacataacctagattacaagcaaaaatagctgctgtaaagaagtccaaaattgattttgaaatcaagattgttgaatcaccagtcattcctgcatctagactaccataaataccagtaccgcttgcgcagaaaagtacgataacagttaacaaggtagcaaggtaatcttcatgagatagtgatgaatggtcgtttggcacgatttttgccatgctacgttgcatgagggcaccgcctttgttaatccaatcaccgagatgaagtgcaagtccaatccctgttccgataacgatagcaaagataacagcgggcatgtatttcatcaatccgatagatgaaatccccattcccattgagcagaccccaaaaatcatattgatttgtgtcttgaagtcttctgataatttgtttccaacaagaccacctagtagccctccaaaaacgactgatagggcattaatgatgacgccagtaggcatacaattttcctccttcataagaaacaaagtcattaacagtttgaaaacattagtgttgactgctagaccgtgttctattattgtgaattctttcttttctgttacattttaacaccaactttttaaaaaacaattcagatttttgtgatatactattctaaaatggaatagtattaagaataggagcaggaaatgaatttccaaaaatttcaagtctttcttagcttgtgtgaaacgttgaattacaccgagacagcagaacaactttatacaacgcaaggaagcatttcaaagcaaatcattgcgcttgaaaaagagttgggtgtgattttgtttaatcgtaaacatcgtcaaatttctctgacagaagaaggggagattgtgcgagtttatgttcaaaagattatggggacttttcaagaaatgcaagagacattagaggatttgtctgaacaagaaaaacataaactaaccattcatggtattccgagtatgtcttcttatcctattatttcagatattgcagcttttcaaaagcagtatcctgattacacggttgttgtcgaggaagaagaggctgaccagctgatgcatagtttagatgatggcatctgcgatgcggtttttacgcgttcttttaccaaagctgctcctgatatttatgatagtctaaccttggattatgaccgttttgtcttggttttgcctaaaaatcatcccttagccaacaaggaaaaacttgatttggctgaattgaaagatgagacattcttccaacttggcaataaaacgcagttgctccaaaaggtacgagaactttgtcatacttatggttttgaaccgaaaatgggctatcaaggaaatcgtatcaatctcatcattgattttattgaaaaagaaatgggtgtttcggtaatgatggaaaaattggttgcaccgtttaaaacgaaagcaattatctgtcgtccgttggaggttgatatggtgtcagaaatgaatctaatccgtcgtaagaagaaaacaacaccagctttggatgtattctggaaaggaatgcaagaaaaatattccaaacaggaataggaaaacgcctaacttgaattgtttatcggtgattgaaggtttacacttttaatatgaaatctttaagaaggaagtaaatcttatgtcagaacaaccttatgatttgcgtaaagtcttggaagaacttaaagaaattccaggacaataccatgaaacggatgttgaaatcgatccaaacgctgaaatttctggcgtttaccgttatatcggagctggcggtaccgtagaacgtccaactcaagaaggtccagcaatgaccttcaataacattaagggattccctaatgttcgtgtcaatattggtacaatggcaagccgtaaacgtgttggtcatattcttcatcatgattacaaagaccttggacatcttttgaacaaagccgttgaaaatccagtgaaacctgttaaagtttctaaggaccaagcacctgctcaagaagttgttcacttagcaactgatgatgattttgatattcgtaagctcattgctgcgccaacaaatacagaatacgatgcaggaccttacatcacaactggtttggtttatggttcaacgccagataaatcaatgagtgacgttacaattcaccgtatggttttggaagataaagatactattggtatttatatcatgcctggtggtcgtcacattggtgctttcttgtcagaatatcaaaaacttaacaaaccaatgccaattacaatcaatattggtcttgaccctgctatcttgatcggggcgacatttgaaccaccaacgacaccacttggttacaatgaactttgggttgcaggtgcgcttcgtaacgaacctgttcaattggttgattctatcgctgttgatgaagttggtattgcacgttctgaatttatcattgaaggtgaaatccttccaaatgaaacaattcaagaagatattaatacgcatacaggtcatgctatgcctgaattcccaggttacaatggtccagccaatccagctttaaatgttatcaaagttaaagcggttactcaccgtaaagataatccaattatgcaaacaacaattggcccttctgaagaacacgtgtcaatggcaggtattccaacagaagcttctatccttaacttggttgacaaagctatccctggtaaagtgcttaatgtttacaatccaccagctggtggcggtaaattgatgacaatcatgcaaatccgcaaagaaaatcctgcagatgaaggtattcaacgtcaagctgcattgctagcattctcatctttcaaagaactcaaaacagttatccttgttgatgaagatgtggatatctttgatatgaatgatgtcatgtggacaatcaatacacgcttccaagcccacaaagatattatgtcgttggaaggtatgcgtaaccacccacttgacccatcagaacgtccagaatattcaccagaacacatccgtgtacgaggaatgtcatctaaacttgtccttgacggtacagtaccatttgacatgaaagaccaatttgaacgtgctaaatttaaagaagttcctgattggaaaaaatatttagattaattgctaactcattttagataacaagactgttgataaaatgagatagaagataaggcaagtaatccttaataagaggctggagctaatcttccaacctcttattttaagagacaaagggcgtgttcaattaagaatttttaagttggtagtcgttggtacgctatctaagcaagtggcaagctaaaaaacgattgtccttatacgctttgaaaatcggacttagatattgttgatttgatttgatttgatgaccttcggttctatctgcatttgtgctacttagtctaatgttgattttcagtgagtattcattacaaaagtgaggtgcttatgagcaaaaaacgtattgtggtagctatttctggcgcttcaggcacaatctatgctatcaatttattaaagaaactaaaagaatatcctgacattgaaacgcatgtggtcatgtctgactgggcacatgagaatttaaaactggagctcgatatgtcacatgatgaatttgccagtttgtgtgatgtgctttattctaacaaggatttgggtgccaaaattgcttcagggtctttcttgacagacggtatggtgattgttccagcttccatgaaaactgttgcaggtatcgcttgcggtttttcagacaatcttattggtcgcgcagctgatgtagctttaaaagaacaacgtaaactcatcattgtcccacgtgagacaccgttaaatacgattcatttggaaaatttgacaaaattatcacggatgggtgtacaagtcattccgcctgtaccagccttttacaatcatcctaagactttgcaagatattatcgaccacaatactgctaaattactagatgctttgcacattcgcaatgattatgctggacgttgggatggtgattagatggcaacatttgaagtgacagactatgggtattctattcaagcgcaggttgactatattggcgctgacttgtttattcaattgacaggcggaagccaccctcatattggcacagtaaccacttattgtaaagaaaatgcggacaagcaagtggtgcgttttccaagccattcagggcgttttcataaagatgacgttttggctgatgttcttttggaagaaatagcagagctgttgccgcaaaattgtgtaattacctcaggtgtccatgttgacggtattagcaaagaacaaattgctggcgcttttgaaatgaccaaagaacttgctagcaagattggcacatggttaaaaattgaaaaatcaccaatcagtcacccaaaataccagaaaaacaccaaacaataaactagtttagacaaatacaactcaaaaaaacgaaactccttttaatccatttcagcgaaaaaataaataagccacccgttttcaacaatcgggtggcttttggttgttgcgttagtttttcatttgtttggcataatgtgtgacaaggagttctgtgaagatgtcaaacataattggggaaatggaatcatattcccagtctcctgaaagagttgggagtgtgatgactttatcaaaatgcttgcgatatttggcatttggattggctgttactaaaagtgttttgcatttcaaattggtgattttgcgaatgtaagtggaatcgccgcctgctgaaaagataagcaataaatcgtcttttttgaaatagttaacggcatcatcaaggtaatctgttgaataagatgacacataaactcccattttccgcatcaaggtttcaaataatttggcacttaaaaaacttttggcaccaccagtggcaaataaatgatcgctttgtgataaaaagcttgctaaatcagtcataacctcatcggtcaacgttgccttagtgagttcgagtaatttggtgaggcgcgtgaaatattcattgtcctcatcagtgtttgtggcgttgtttgatgaaagccagttgataaagtcaaagcgaaaatcttgataacgtttatagccaagttgttttttgacaaaacgagttagcgttggctgagaaacacctgcttttttggctaaatcagtcgtcgtagcatgggtgactaaagacggttgttttttgattaaatcataaatagctaattctgctggtgagaattgttctttcaaactttccatgataattagtggattcatataccattcgttcccttctcttaaatttattataggtgatgacgtaaataatgtaaataaaaaatttaaaaaatattaaataaaatatttacaaaacacaaataatgttgtatattatatttatagaagcgcttccaaaaaaatatgtatttgaaacaagcttttaacgccctttgtatcttaagtaatcaggaggattaaatgtcaattaatcaatggatttttgatgaaacgaataattgttatatgtctttgaagaatgtttattgtgctcagccgaaggagagtgaactagaggctttgcatatctttgtgccagcagtttatatgactgcagatggtaccattgatagagacgctgtggtcacaaacaaaaatggcacaatctacacaagccagacggttcctatcattttttacaatgatattggtggctatgctgaatgtcaacctgcaatggtaacgccgcgtaatcagcgctatttggaagatggttatgtccttgtcagcgtgggagctagaggtcgtcagtcgcaaaatggcattggaaaagctcctgcaggcttggtggatttaaaagcggctgttaggtggcttagaaaacatcacaatgacattcctggtgatattgaaaaaatcattagtgtgggaacgagtgctggcggtgcgatgagcagcttactaggtagcacaggaaatcgagcagaatatctttcttttttagaagaaattggtgctgagcttgaccaacgtgatgatatctttgccgcacaatgcttttgtccgattacaaatttagaacacgctgatatggcgtatgaatggatgttccaagcaaagaaaatttatacgtttaattcacgtgttagacctcaaattatcaataaacgtcaacagttattaagtcagtctttagcggttgaatttcctgagtatgtgaacagcttgcacttggatgaatctttgacggcagatggtcgtggtgggaatttttatcaaggtattctcaatcaacttagcttatcactcaataaatttctcgccaaacatgctcaaacaaacgatgaaaaggaagaattggctcgtgaattagacccgcaaggattgtggtgccattttgagaatggtcaggcgactgtctttgacttggatgcttatgttgtaaactatatgggacgtaagaaagattgccctgcgtttgatagcttagattatcaaacacctgaaacagaagtgtttggaaatcgtgacaaaaatcatcgtcacttctctgaaaacgtagctaagcatattgagaaattgccagcattgagtgactatcagaaagcatttcaagctgatttggcagaagaagatttgatattagccagaaaactcttaaatccaatgactttcttgcagtctgatttggaggaaaaacaggttgcttctcattatcgtatttgtttaggggcaaaagatgcggatacctcatttgcgatttcttacttattagcattagctttgaaaaagcgtggtattgatgttcattatgaattgatttggggaatggggcatgctgatgccgattataacgaagaatttagtcaatgggtggatgccattgttcattaagaaaggaaattattatggcaaaaaatcaagcagatttggttagaagcattattgaaaacgtcggtggtaaagataatgtgatatcattgacgcattgtgttacacggttacggtttgtgttaaaagatgaccatttagctaataaaaaagcgttaactgatttggatgaagtcatgacggttgttcaagctggcgggcaataccaagtggttgtcggtgaaaaattggtggttcctctttatgatttggcaatgagccagctccaattggctagcggcgacaaagaagagccagtagctaaagaatcgacaggcattgtctcaaaagttatggattccatttctggtgttttatctccaattttaatggttttggcagcagcagggcttgtcaaagggctaatgtccttcttttcatcattggggtggattgataccgatagtggattgtacatgattttgtacgcacttggtgatggctttttctattacttcccaatcttactaggaattacagctgctcgtaaattcaaagtcaatgaatttgtcggtgctgctattggtgccgctttgacttacccaacaatggttaaccttagctcaacagcagatgttttaggaacggtgttccaaggaacgtcgtttgaaatgagttactacacgactgtatttggcattcctgtcatcatgcctggtagtggctacacgtcaagtgttattccgattattttagccgttttatttgctgcgaagttggatagaagtttgcgcaaagcattgcctgatgtgctgaaaaatattgttgcaccgtttgtaacattggttgtaaccgtcattttgacttatctagttatcggaccagttgctacgcttatttcaaatagccttgcttggttggtttctgctttgtatagtattccttatgttggtggagccattgctggcgctattctcggtggaggttttggtgttctggttatgttcggacttcattgggcggttcttgctatcgcgatttctaatattgcggtcaatggatttgactacattgccgttgttacagcagttggtccatttgtcggtatggctcaagggcttgctatctgtgctaaagcacgtagtacaaaagttcgaaacctcgctttaccagcaaccatttcacaaatttgtgccgttggtgaaccattgatgtactcaatcctcttgccattgaagaaagaatatgccattaacattgtttgtggtgcgattggtggtgtcttacttggtatttcaggcgcgaaagcttacctcatgggtggacaaggtctctttggcttagccaattatattgaccctgccactggcaatatgagtgatttctataaagtcctcatctgccttgctatcgccatggtattaacctttatcgtcgaatttatcatgtatagcgacaaacgtgccgaagaagctttgcaataaataggaaaacacccttgtagtttgttgaactataagggatgttttgtgggagaatgtataatcatgctatcgaagaaaaggagctataaaaatgaaaaagaaatactatttattattaggcactataatttttataattttagtagttattggttataaagccgtatctatatcagatgattctgtaggaaaagctgttacggaatccaatattactgctgaagacttaacaaaagctgccttgtattttaaaaatactagcgagcagactgatactaatgaatatgatttagaatataagtttgcaaaagcagcagcagaactaggaaatgccgatgccatgctctatatgggtgaaatgtatcaaggaaataagattagtcaagctgccaaaggtgataatgttcagagtgctattgaatggtgggaaaaagctgctgaaaatgggcaaccgcggggatatactaatattggtttactttatatgcacgaatctatccctggtggtggtgaggactttggtgacattgagtataatgcaaaaacagctatcaaatattataggaaagctgctaaaatggatgattttaaagcttatcgctatttggggcttgcttatcaagtcggtgtaggcgtaacacaaaatgacgaaaaagcttatgagaattttaaaaaagcggcagaccttggagatagcacaggacagctttatcaagcagattatttactagaaggtaaaggaacaacacaagatgtaacaactgctatcagtttatatcaagatttgatagacaatgaggctcacgataaagctacagctgcgtatcaattaggtgctatttatcaagagggaatttatacagccgcagacatcgaaaaagctaagtcttactatcaatttgctttagatactgccacagaggaaaataataccgaattagccacaaaagcaagccaagcattagaagcacttggataggaacttttttaaaatctcacttgacaacgcttacaaaatcaactacaataaaactataattaaacaaggattgttactcttcgggaggcattaccgttcatcaagtaaaggggtgtggtatgtcttcgaagagtttttttgtgcaggacaaatagcataaatagaaaaggtagatatgatgagagttgtgaagaaaatcaataataatgtggcagaatgtcttgacaataatggtaaatcgttggtcgcctttggacgtggtattggttttccaaagacgccttatgagctaggggatctttcaaaaattgatatgacattttataaattagattctcattttcaattacttttggatgaaattccagaagatttgatgttgcttagtgtggaaatcgtgcaaaatgcgcagaaggagttgtctggaaaactcaatccgactttgatatttagcttggcagaccacatccaatttgctattcgtcgattgaaagaatttaaggaaatgaaaattcttttttcacaggatgttgctcagctctatcctaaggaaacgaaattagcagaagatgccttggttttgataaatacttcattaggtgttaatctcccacacagtgaagtgaccagtattgccatacattttatcaatagccaagccgaatttgacattgacaacgaaagtcaggctatcgaagaattgattgagattatgacacagatgattgaaaaccaattagcaattcgtattgagcgtgaagaatttaattaccaaaggtttcaagcacatgttcgttattatctgaagcgactacgtgaaaatgaatcatttattaatgggaatgagactattttacaaagtctcaaagaaagtcaacctcatatctatcaagttgcagtcgttatcatggattatattcatcaaagtatgggatatagtcaatctgatgacgagttactttacctgatgatacacatcaacaggttgtatgaaaaaaatagcggagaaaaatagcgaagctccgcaaaggagaaagttatggtcgataataacaaagttatcgcagaaaaagtgcttgctgcggttggtggcaaggaaaatgtgatgagtgcaacacattgtatgacacgtttgcgtttgaatttaaaggatacttccgttcctaaaaaagacgaggtaaccagtatcccaggtgttcttgctgttgttgagtctggtggacagtaccaagttgtcattgggcaaaatgttgcaaaagtttaccctgagtttgctaaattagcaggggtcacattggaaaaacaagttgacgagaatctggataaaccaaaagaaaaattaacattaaaaggtgtgggaatggcaatccttaattatatgtcaggctcaatgacacctttaatcccagctatgattgctgcggcaatgtttaaaacgattcaagtcgttattggaccagatttacttggattggtttctgaaaagagcgatatgtatgttttatgtgatattatgtatagtgcttttttctacttcttgccaatttttcttggttttactgctgctaaaaaacttggtgtgagtcaggtcatggggataatgttaggggcgatgttgctagtgcctgactttgttgctttggatggtcaaaaatttaccatttatggttttctaacaacaactgctcatgattattcgcaaacggttttacctgttattatttctatttgggtaatgagttatgttgaacgttttttcaaaaaaataattcctgatgttttatcaacgattttcgtgccatttctaacgatttttgttatggttcctattacctttgttgttttggctccaattggtaatcttggtggtgaattaattgggaatggcttgattgcttttggtaatgttggtggctttcttgcgattgctgtcgttgcagccttgtgggaattccttgttatgtcaggaatgcaccaagttttgattgtttttgggattactgctatgatgcaaaatggttatgatagttttgttttgacagcaggtggttatgcaacttgggcagcatttggtatggcttttggagcatttctgcgttttcgtgaaaaagatgctaaggctttggcgtttggttattttgtttcagcgattataggtggagtaaccgaaccagttctttacggtattggacttcgctataaacgtccttttcttgcccttgcagcaggtggcttctgtggtggactttacgcagggttaacccatgttggaacttatgttatgggagctacgaattttctagctgttcttggctatgttggtggtggaacagtgaacatgataaatggctgtattgcggcagcgattgcttttgctgtaactgctgttttaacgtatcttttcggttttaataaaacagaaagtgttttgtaaagaaattaggtggtttttatgaaaaaaattcttttgcgtgctgatgatttaggttattctgaggctgttaattatggtattgaaaagtcggtcaaggaagggctgatttcaagtcttggtgttatggtcaatatgcctgctacgcagcatggcgttgatttaatcaaagattgtcctttggctcttggggtgcataccaacatttgtgctgggaagcctttgacaaatcctgagcttattccgagcttggtggatgagaatggtaatttcaaatcttctaaacaattccgggcggcgaaagaggattttgtcgtttttgaggaagttgtcttggaaattgaagcgcagtaccagaaatttttagccttatttgggcgtcagccagattattttgaagggcatgcggtagcgtcaagcaatttctttaagggattagaaactgtcgcagaaaagcacggcttgaaatactcaggattttcaacaggtggcgcaccattgacaattgggaactctcttgtgcaattcaatatggaatcaatggcgccgcattatgagccttttgacatgctaaaacgcatggtagcaaaagccgatgaccatgtggtacagttggctatttttcaccctggttatcttgatgatgacattctaacgcactctagcctaaccattcctcgaacacaagaagttgctatgttaatcaatcttgatgtcaaacaatggctcagaaagcaagatgttgaactcattgattaccgagatttgtaaaacagtatttgttggctataatctgcttttcaatgtcatgtgcttgtaaaccagctgtctattggacagttggtttatttattccaaacaagaataaaaagtagttaaaatagaattgtaagcgataacaaaatgctttaagatagaatcataaagattgtttaagaaagtaggtgtaaaaatgattattgatagtaatttatactggtttgatgaagatatttttgagtccgaaggaaaaatggaagcttttctagcgagtgctcccaagcagtatgataccaaagtccatgctggaactttaccagacggacgtcagcaaattatcattgaacgtcctaaaggatttgaaaatttgaattatgttcaaggggaatataagcttgaaacgatgttggctgatatggacttggctggtgttgataaggctgttttgaaaattccaggttgtcaagaatggttgactttggagcaatgtaaagctttcaatgacggtatgtatgattacatgaagcgtagtcaggggcgtttggttcctttagctgttttaccaccatatggctctaaggctgtttttgcagaaatgaaacgttgctttgaagaacttggatttacaggtgttcaattggttgctcactatggcaattactaccttgataatgatttgtttgcaacattctttgaagagcttaataagtatcaagcaacggtttacgttcaccatacaccagttcctacacagtatgatgcgctttatgaatacacaaatgtccgtcgttcttatggacgttgtgttgaccaaacaacggcaatttgtcgtgagttgtatagtggtttctttgaaaaataccctcaattgacttttgtgcattcaatgctcggaggagcattctttgggttgaaaaatgtcttaatgccacataaaccaagcaaagctgatactgttcaacgttttggtggggatgataagcatatcgaggaacattttgctgaaaatatttattttgaaatgtcacatgcgcaaccttggggaaaagatgctttagagtatgccgtgcaagttttaggtgctgaccatattatctttggctcatcatatcctgtccgccaagaatggctaacaaaaggtgctgactttgttaataatttggatttgacagcagaagaaaaagacttgattttaggaggtaatgcgcaacgactttaccatattaacgattaatggaggtagctatgttacaagcaggtgcagggaaatctcgcattcagctgacagaacaattattgccacttgaaaaatttacctattgtcatgatgacttgtactgccgagctattattttagaggattttgtctttatatcgcttgatttaacgtctttacaagactatgcgattagagccataaaagacaaggttagggcaaactatgaggttttagatagtcatatttttattagtgtcacacataccttttcggcacctcatacgcgttctttaaaggcattggaaaaagtagacacgcaaaccaagcaaaaaaatcaatattatttagaccttttgcttcaagctgttgaagaagctttgcttttagccaaaaacaatttacagccagtttccctctcttgccaaaatgtcacggcacaagctcaggtaaaccgcgatatagagctaatagatgggtattggttgggaaaaaatccgcacggttattctaatcatatgattccgatgttgacaatctcctcgacgtcaggagcgttaatagccatgatttatagtgtggatgttcagtcgtctatcgttgaaaaaataggtgacggggctattagcagtgattttatcggtttaaccacacaaaaaatcgaagataagcttaactgtgttgctttatttatgcttggagcagctgctgaccagacacctaacgtcagccaagaaagttttgacagcctagaacgctgttcagatgaattagcttcggcaatactatcacaagtgacagaaaatgaacatttcgagggtgattttagcttaacccaaatcagcgttgagcttgacggacaagccattcctgatatgaaaagcttaaaaccaacgagggagtatcactttgaattgcaaggtaaaaagcaagttgagttagcgattttgaccattggagattttggattagtcatgctaaagcctgaattggcaagcattacaggcaaggtcattagagaacaatctcctttttccgtaacaatgattgccacgatgattaacggtggtcaaaaatacatggtggatgagaaaagttacgataattatacttatgaagcaatgaattccatgtttgcgcgtggtagtgctgaaaaagttagtaaggctattattaagacattaaaagagaggaagtgagcttatgaaggttggatacggtcgtgcagacatcacaccgacagccccattttacttattaggatataaaactcccaaacgaaatcaacccgctaaaggcattcatgaccatatttacattaacggtattttatttcataacaatgaaggtcaagaagtttttctggcaacaggagaccttcttgaaatagaggatattgttgccgcagatattcgacgtgaaatcagtcaaacctatcagattccttttgaaaatattattatcggtgtcacacatgaccaccattcggtacgtgattttcataaaacttgggaatttgggcgctacaatcaagagtattatgatttctttgtgcaatgttttcttgatgttgtcgcacaatgtcggcagaatcttgtcgaagctagtgtggaatacgggcaagatttagtgcttggttattatagtaatcgtaatcataaaggaagccaatcagataatattgtctcagtgacaaaatttattcacgatggcaaagctattgcagggattgtcaatatcgctgtccactcgacggttttgagtggcgagaatatggaattgactgcggatttagcaggaaacctgtcaacaaaattaaaagaaaaatggggattttacccattgatgttaataggctgtgcaggtgattctagtaatcattacgaccgactggggcgtgattttgcagaattagaacgtgtgacaactggattagctgagcttatcgctcctataaaaacaactgaactttctcttggaacagaaagcattaacgttttggagcttagtcacgaggtcatcaatgacaaaaaagcttatgacaaagacctttgtttgcgaattgctggcatgaaaaatgggactattaagaccgttggcgctcagccagtcgaacatttgattgaaaagtgtgaagagcagctaacgatgccacaattttatgacatcttacaacttggaatcttggatattggaaatttaagattcttcatcttccctggggagctagcatctgctggcggagaattattgagaaatgcaacggataaaacggtgttgattgctggatatagcaatggtttccaccattatttcttagaagctaaggattatgggctaagttttgaaacgattggtaaccctgttccagcaggaacttttgaaactattattgaaaaatttagtcgtgcaagtcacttgctagataactaacgagccgtaatcggggctgtgtgaagtcgattgaagattttagataggagttctagttatggactacaataaattaggaaaagatattctcactcaggtggggggcaaagaaaatgttagcagtgttagtcactgtatcacacgtgttcgctttattttaaaagacgaagccaaagctaacgacgacgttattaaaaatatgtctggtgtcctcgatgttgtcaaacaaggtggtcaataccaagtcgttgtcggaccgagcgttgaaaaagtttacaatgctattatcgaagatggcgatattgcaacgaacgagggtgatagtacagcagcaaatacagaagatgataaaggtttcattaacaaagccttaggtcttattagttctattttcattccagtattgggtatgttgtctggttcagggatgattaaggctgttctggctcttcttagtgcttttggttggatgtcaactgagggtggaacttacattatcctaagcgctttatcagatgcactattttatttcttcccagttgtattaggttggagtgctgctaaacgctttgggttaaaagaaatctatggtatgacactaggggctttccttgtctatccaactttagtatcggctgctagtggcgatgctattaatacgctattttctggaaccgttttcgaaatggattatcaattaacatttcttggcattccagttgctcttcaaagttatgctagtaccgttattccgattattgcggtaacatggtttgctagttatgtttacaaattctttaacaaacacattccagatgttttgaaaatggtctttgttccattttgtaccttgattgttgctggcgcagctagcttgattgtcattggtccaatttcaattgtccttcaaaacttattgagtagcgctgtgatgtggctccttaatctcaacattggtattgcaggtttcttgattgggtctctctggtctatcttggttatgttcgggcttcactgggcaatcctaccattcttccaaatcaatgtttctgaatatggttacgatatcatcaacccattgattttctcaggtgctccagccgttcttggttctgcacttggtgttgctcttcgtactaaaaataaagatacacgttcaatgtcatttgcggcagccgtttcatcattctttggtgttagtgaaccagcactttacggtgttatgattcctcgtaaaatgattttggttactggtcttgctgcagctggtgtcggtggtgccattgctggacttggcggtgctaaactttacacattcggggctcacggacttcttggcttcccaacatttatcaatcctgacggtattgatggcggctttattgctctttgtatctcaggtgttgttgcctttgcgattgccttggtatcagccttagttattggtgataaacaagacagcacagcgttactagcaaaaaaagcagaagaaaaagcacctgctaaagcaaaagaagtgacaattgtttctcctgtaaatggtcaagctgttgatttgacaggtgttagcgatcaagtcttttcacaactactcttaggtgacggtattgcagttattccaagtgacggcaaggtctatgcaccagaagatgcgatcgtccgtgttgcctatccaacaggtcacgcggtaggattagcaggtgctgcaggtgatgaacttctcattcatattggtgttgatacggttaacttaaacggacaatatttcactagtcatgttgaacaagggatgaaagtgaaaaaaggtgaccttcttgttgaatttgaccttgatggcattaaaaaagcaggttatgacccaacagttatggtcgttgttaccaagactgaacaactagataccgtaacaccattaacacaaggaacagttgacacaacgactccattactctctattaatttaaaataaaaccaaaaaagagttggcgacgctacgctaactcttctttttacaaggagaataagatgaagaaagtgataatatctcattatggactacccatcgttaaactgatggtgattttagttgtgggcattttggttctaggtatcagtcatacggttcaagctttaacaagagaggaagtcgcagaaaatttagctataaatgtcgaagatggactatcatcagaggaatattttgcacttgggcaacaatacgaaacgggtgatggcgttgtccagtggtatgccaaggctttggcatactacaaagcagcagaagaacaaggcttggttgaagcgaggacagcgattgataatcttaatgcttacaaagcagaggtccttgccgacggtgaccaaggggctatttttacattctatcgtacaggtgtgacagctagtcaaaaaggagactatgagcaagcttttgctatttattacgatgacagttttttctttgaagatccacaagatcgtggtttgggaggattagctgatctctacctagctggtgacggtgttgagcaaaatgtttcttctgctatgagtatttatgaagtgatggctgtggaacaaggaaaaggaaatggatacacagctttaggaaatatttatgcggcagctacagggacttatcctggggttaatcaaagtaatgatacggcattgaagtattatttattatccttccaaagtgataatttaacagcgacagattttaaaggacctcgttacgctgctaatttttatgattcaggtttttatcatgatgacggcacttgggaaaatcccaattataccttagcggaagaatattacttaattgccgttgctggtaatggtagaacgtttgacggaacagctgcttataagttgggaacgtattatgaatatggcagagaaggaattgcacaagattatagcaaagctgtttattattacgaaaaagctttatcagattctaatgtgcattcaaccatgctaggaattccagatacttatttagcactcggacgattttacgaaaatggattaggggtagcaatcgatttagaaaaggctctttcttattattatcaagctcaagctgctgcgcaagataatctggatttaggtggtaatgttgctggctacgaagccgcccttaaagtttatcaagaagccaccgaagctatccaaagattaactcaaggaacaaatgacactgagacaacgacagaaaatcaacaaactactatagatgacacgacgacagaaactactagcggtgatgaaaatcaagaagttgtgacattatcagatgctaccacaggcgtatctgtaattggaacacaggcggcactatctaatgcagttactgttgtcgtgatgagaactacggtagctgccttaaaagacttaaactatgatgcctatgatattacacttcaagatgcttttggaaatgaggttcaacctagtgaagccgttcaagtaatattgccagccacttacgaagtatcagcgctttatcatgttggaaacgatgatagcctaacttccgtcgatgttattcaaaatggaaataaagtaacctttacaacaagccattttagtatctatgcagttgtctataaagaacaaatagccttagaagaaacctcttcagacgtcgctgtctcagaacctcaaaagaaacaatcagacacattacctaaaactggtagccaatcaagtaagcctctcactttcattggagtggcattggttatgatactatcagtattcaccataaattattttttaaaacaaaaaaataatgagtaggaaatagaaatattaggtaggaatctttatgaaaaaaggtatattattttttgtaagcgctttagcggtacttgccgcatgttcaaatactggaaaacaagagccatctaaacaaacaaatgaatcgcaaagtagttattatcaagtgacatctgatgacatttctatcacaaaagatgccacatatagcgttacgctgactacagaagacacttggcagtttgtggctgaggctggtcaagacgttaccgattggcttgttttgaaatcagataagcaagctttaacagatacctctggagttgctcaaataacggctgttgatagtgattcttcagctattaccattactattgatagtagtaaaatcacaggattttcaagcaatggtggagcaaatctttatattatgccagactccggtagcattgtaggaactggcgacaatcacgcacattatagtgaaacaagtgctaaaattgggaaatacgttattccaaaagtaagtgttgacggcactattgagggagaagtaacacaagaagacggtctaacatttacagaaaatcaaattactttccaattcacagttgatggtgacgaagcagacagtagcttaatgaataccgaggctgctaacattgtattggcagaaggagacggttactacactagtgattacacctatagcgaccaaggtttatcaactaaaatgaaaaatggaagtatcagctacaccattgaaccagaagatttgcaaataagcaattcaggatacgaacttggcgaaaacggaggtggtcgcaactggtcagaaatcggtggcgacggtaatggtaattaccatttaaattttaaattatcaggtttagaatacaacggtttgcctgtaagtgttgaaacatttacggcggatgtttattgttacggtagaacctttgaggttgatgacggaagtatttacgctaatgatgtcgctaaatggtcaacaacagctgaaaataatactccagttctttgtgatgattacacagatgatctcattattgattgggcaaatggctttgatgcctctaagctgaaagctaaagaccttactttaacgatgaaaagtcaatatggtgacatcttgactctaacggctggtgatgattttacgattgaaaccaagaaaaatcgaacaacgattcatgttaattatacttattgggcatataccccagtttaccaaacgctgacggttgatgttgccaagaagcatttgacatgggatgaggatgaatacaaagttgacgacatttcgcatgattacagcattgctagtgtttatgtttataatgttatggcaggcggtcagacaggcacacaaacatggacaatctatggcttagacgggctagaaaattggcaacaaatttttaatgccccaacttatactttatctgctgagatagacggtgaaacacgctattattcagaagcaaatggtggcagcttagttgatgaagcgtcagcgacaagctacgatgcctcaactgatacaaatcttcaattgcttgataacactatctatttaacacgtcagtataatcagacagaagtcaaaagtataaacggacaagatgtgactttcaccaaagtttattcacaagctgaatcagctattaaagctccaaaagatgttaccaatgtgacagttaaatctggcttcattctcggtgacacttgggaagaacacttgagatggccatggcaaacctttattaacgaaggctaccaaggcggtcgttcataataaaagctccttaggcatttgccctaaggagctttttgaatcctatgaaatctagtctatcttttttagaaattctagtaaaaaactttcggcgagcgaaccgtctttgatagctctcttggcttcctcaattgaaaaccaatcccaatcgtcaatttcgtggttaggtgacacattaccagtaactgttaccgcaaaattaatcatgagtgaattgctgcgctcataatactgactggcgttaaacgtcaacgatttaacccttaaaccaagttcttcaccaatctcacgcgccacagtcgtctcggcattttccccttgagacacataaccagctagcaagatatgctcagccatgtcatattgcttaatcaagagaatcttatcatgattttcattaaataaaatcgcactaattgccgtattaaagactggaaaacgaaaactcgcacattgtgaacaataaggaatatctccctcatcttttaagaattttttctccaaaggatgcccacattcgggacaataagtcattgttttgtaaaacatagaagcctcttttttaaagttcttaaaagcaattttaccagtaaaatcaagaccacgcaagacattgaaataaatcaagacttgttttaaatttattttaagctagactaaacttatcagctattggttctgaaaaagtgtctgccacagttttactacaaattctcatgacttttgccaagatttctaaaaaacggatagctataatagctcttagagcaaaaaaatgacatataggaggttaaagacgcgtcatacttacatctttttatcgccattttaggagagttattgggaactaacttattgaaattatcagacggttttaccaaacctattccaaccgtttctgccctacttagctatggcgtttgtttctatttcctatcactcgcaatgcgaaaaattcctttaggagtaacttatgcaacatggtcagctgtcggtttagttttgacagcctttatctcagtaatgattttcaaagaaatactaaatgtttatagcattatcggtttaattttgattatcattggtgttgtcatggttaacttattaggaaatgcaggacattaataaaaccaagccatttggcttggtttttgtgtattatccttcaaaataaagcaactcttttggtgtgtgtgtaaagacttcaaagccagattttgtgacgtatccgcaatcttcgatacgtacgccaacttttccagggatgtaaatgccaggttcgacagagaagcacatgccttcttgaatttccatatcgttaccttccatgattgaaggaaattcgtggcaagtcataccgataccatgtccaagacggtggttgaagtattcaccgtagcctgctttttcaatgacattacgtgcagcagcgtcaacttcgctagcaagaacaccaggtttgatgaattcttgagctgttaattgggcttctaagcaaagttcgtaaatatcttttttgaattggtcaggtttaccaacggcaacggtacgtgtcatatcactagcatagccatgcatatctgttccaaggtcaaacaagagtagtgagttattttcaattttgttcgtaccagggataccatgtggattagcagcattatttccagttaagaccatagtgtcaaaactcattttttcaacaccttgttttttcatttcaaactcaatcatggcaatgacgtcagtctctgtattgtctaatgaaatattatcaaaaccaacttgaaccgctttatcagcaaactgaccagcaattagcattttttcgatttcatcttgtgatttgatgagacgcattttttgaataaacggtgtcaagtcttcaaaacgtccttcaaaaacagtttgcaaaccttggaattttgtcacattgaggttgtcaaattcagcaaaaactttcgcgctgtcagttgaaggcagaacagatttgattttttgccaaggattttcagaatccatgtaaccaaaaacagggaaagcgacgatttggcttgcgcgtgccacttcaagcgcaggaacgaaaagcacgggttcacggtcgctatacacaaaaaggaacatttggcgttcgtgtgggtcacagtaaaatcccgttaaataatttacagtaacaggatcagaaaaaacagcaatattagctttttcttgactaagatacgagcggatttgatttaattttgacatgagaaaccttctttctaattaaccccattttttcaaaaaaagtagaaaaaatcaagacttgagtcaaaaaaagtgaacttatagagaaaaaaatagcaaatgagataaaaggaagttttcccataattctaatgaaaattttcacaaattattttgaaaagcctcaaattttgacttttcaagtagtttgatacagaaatcaaccaattaaacgcttacaatatatgaaaagttttcaaaaaagaccacttaccccttgaaagtgtttccaaaagatgataaaatatccgtgaaagcgaaattttcaaatagaaaggaagtccaataatgaacactgatgatacgattacaatttatgacgttgcccgagaagcaggcgtctctatggcaacagttagtcgtgttgtaaatggcaataaaaacgtaaaggaaaacacacgtaaaaaagtccttgaagttattgaccgtttggattatcgtccaaatgccgttgcccgcggtttagcaagtaaaaagacaacaacagtaggtgttgttatccctaatattgctaacagctatttctcaattcttgctaaagggattgatgatattgccgctatgtacaagtacaatatcgtacttgcttcaagtgatgaagatgatgataaggaagttaacgttgttaacaccttgtttgctaaacaagttgacggtattatcttcatgggacatcatttgactgaaaaaattcgtgcagagttctctcgctcacgcacaccagttgtacttgcgggtacagttgacttagaacaccaactcccaagtgttaatattgactacaaagcagccgttgctgatgttgttgatattttggctaaaaacaataaagaaatcgcctttgtttctggtccacttatcgatgatatcaatggtaaagtgcgtttagctggttacaaagaaggtcttgaaaaaaatggcttatcgttcaaagaaggccttgtctttgaagctaattacaactataaggacggatttgaacttgcacaacgtgtgattaattctggcgcaacagcagcctttgttgccgaagacgaattggcagcaggattgttgaatggcttgttcgaatctggcaaaaaagttccagaagactttgaaatcatcacaagcaatgattcaccaatcacatcatacacacgtccaaaccttagctcaatcagccaaccagtttatgaccttggtgctgtcagcatgcgtatgttgactaaaatcatgaacaaagaggaactcgaagaaaaagaaattcttcttaaccacggtcttacaacacgtggcacaacacgttaatagttgactagttatatcaaattaaaaatcagtcctcggactgatttttttgactcttggtgaaaaaaaatacaaaataagatataatagaaattatgaaagttttactgtatttggaagccgagaattatttgagaaaatccggcataggacgtgcgattaagcatcaagagcgtgcccttacaatggtggggcaagaatatacaactaacccgaaagacgattatgatttagtacacattaatacttatgggcttaaaagctggcatctgttgatgaaatctaaaagagctggtaaaaaagtgcttatgcacggtcattcaaccgaagaagactttcgtgattcattcattggttcaaatttagtatcaccgatttttagatggtatctttgccgtttttatcaaaaagcggatgctattatcacacctacggaatactcaaaatctttgattgcaggttatggcattaaacacccaatttacgccgtttcaaatggcattgatttgtcacgctatgttccagattctgccaaagaagaagctttccgtcgttattttgatattaaaccagatgaaaaagttgttgtttgtgctgggctttatttcatgcgcaagggcattgatgaatttgtaaaagtcgcagaacaaatgcccgacgtccgttttatctggttcggtgaaacaaataaatgggttatcccacataaagtcagaagcattgtgactcgcaaacatccgtcaaatgtgacctttgctggttacattaaaggtgatgtttttgagggagcaatgagcggagcagatgcctttttcttcccaagtcgtgaggaaaccgaaggaattgttgttttggaagctcttgctagccaccaacacgtcgtgctacgtgatattcctgtttatcacggctggatagatgaaagttgtgcagaattagcgactgacgttggcggatttgtaggagcgcttcgaaaagtcttagcaggaaaaagtcaaaaacaagaagcaggctacaaagtggctgaaagccgtagtatcgataaagttgctcatgaattagttgacgtctatgaaaaagtaatggagttgtaaaatgagaataggtctttttacagatacctatttccctcaagtttcaggggtttcaacaagcatttgcaccctaaaagaagaattggaaaaagagggacacgaggtttatatatttactaccaccgataaagccgttaaacgctacgaggatccaacgattattcgtctgcctagcgttccttttgtgtcgtttactgaccgccgtgtggtttatcgtgggttaatttcgtcttataaaatagcaaagcagtataagttggatattattcacactcagactgaatttagtgttggtgttttagggaaaatgattgctgctgcgctccgcattcctgcggtacacacttatcatactcagtatgaggattatgttggttacattgccaaagggaaaatcatcaaacctggcatggttaagtacattattcgcggttatttgaacgatttagacggtgttatttgcccgtcacgcattgtcttaaatctgttagacggttacgatattaaaattcctaaacgtgttatcccgacaggtattcgtgtggaagaatacgaacgcaaggatattacagcagaagatgctaaagctctccgcgataaattaggtattgctgatgacgaaaccatgctgcttagcttgtcacgtgtttcttacgaaaaaaatatccaagctatcctaaaacaatttccagaagttttgtcagaaaataaacgtgttaagttagttgttgttggtgatggaccctatctccaagatttgaaagatttggtagcagagttgggcattgaagaagctgtgatttttacaggaatggtcccacatgacgagacagctttgtattataaggcaagtgatttctttatttcagcttctactagtgagacacaaggattgacctacacagaaagccttgccagcggaacgcctgtcattgctcatggcaatccttatttggacgatattattgaccaaaagatgttcgggacactcttttatcatgaagaagatttagcagatgcaattttagatgcgattgccgatacaccagcaatggacgaaagaacatacaaagaaaaaatgtacgctatttcagcagagcattttggaaaatcagtctatgccttttatttagacgtcttgatttcagccaaaaataagaaaaaatcaaaattatcattgacggtgcgaagccaagatgaaaaaacatctatcaaatttgctcaatcagcgataaaaatgccagctaaagctgttaaagcgacagctaaaacatcagccaaagttgtcaaggctccaaaacgattaattaattcaattcgagatttcattgattaagttcttgaaaaataaattattcgtgttataataacttacgaagacaagttgaacagggttaaacctttagagcgagtgccggttggtgagaagggcgcagggttagctgattcaatactacttccttgcttttatgcaaacataaaacggtagctacgatatagctaatttgaggtttacgactcttttttgtcgtagataaatgaaggtggaaccacgttacgacgtccttttgggacgtcgtttttcttttatctcggaaaaaagtctcataagctgataacattccttttgcttggttccccaaaaaggaattgtcaacattgtaaattattaaaaggagagaaatatggttaaaatcacttttccagatggcgctgtgcgcgaatttgaatctggtgtaacaccttttgaaattgctcaaagcattagcaattcactagctaaaaaagccttggctggtaaatttaatggtcaattgattgatacaacccgtgaaattactgaagacggtagcattgaaatcgtgacacctgaccacgaagatgctcttggtatcttacgtcactcagctgctcacctttttgcacaagcagcaaaacgtcttttcccagacctttgccttggtgtaggtcctgctattgaagatggtttctactacgatactgataacaaagctggtcaaatctctgatgaagatcttcctcgtatcgaagaagaaatgaaaaaaatcgttaaagaaaactttccatgtattcgtaaagaaatcacaattgatgaagcgcgtgaattgttcaaaaacgacccttacaaacttgaattgattgaagaacatggtgcagacgaaggtggtcttactgtttattcacaaggtgaattcactgatctttgccgtggtccacacgtgccttcaactggtcgtatccaagttttccacctattgaacgtcgctggtgcttactggcgtggaaatagcgacaatgcgatgatgcaacgtgtttacggtactgcttggttcgacaaaaaagaccttaaagcttaccttaaacaacgtcaagaagctaaagaacgtgaccaccgtaaacttggtaaagaacttgatttgttcatgatttctcaagaagttggtcaaggtcttccattctggttgccagacggtgcaacaattcgtcgtacgttggaacgctacatcgttgataaagaagtagcttcaggctaccttcacgtttatactccacctttggcttcagttgatttgtacaaaacatcaggtcactgggaccactaccgtgaagatatgttcccaacaatggatatgggtgacggtgaagaattcgttcttcgtccaatgaactgcccacaccacatccaagtttacaaacaccatgtacactcataccgtgaattgccaatccgtattgcggaaatcggtatgatgcaccgttacgaaaaatctggtgctttgtcaggtcttcaacgtgttcgtgaaatgtcacttaacgacggtcacttattcgtaacacctgaacaaattcaagaagaattccaaaaagctcttcaattgattatcgatgtttacgaagatttcaacttgactgagtaccgtttccgtctttcactacgtgaccctaaagacactcacaaatactatgatgacgacgaaatgtgggaaaatgcacaatcaatgttgaaagctgccttggatgaaatgggtgttgaatacttcgaagcagaaggtgaagcagctttttacggtccaaaacttgatattcaagtgaaaacagctcttggtaacgaagaaacattgtcaactatccaacttgacttccttcttccagaacgtttcggtttgacatacattggtgctgatggtgaagaacaccgtccagttatgattcaccgtggcgttatctcaacaatggaacgtttcacagctatcttgattgaaaattacaaaggtgccttcccaacatggcttgcaccacaccaagtaactgttatcccagtttctaacgaagctcacgttgactatgcttgggaagttgctaaagttcttcgcgacaaaggcgttcgtgttgacgttgatgaacgcaacgaaaaaatgcaacttaaaatccgtcaaagccaaactaagaaaatcccttaccaattaatcgttggtgacaaagaaatggctgataagacagttaacgttcgtcgctatggaagcaaacaaactcacacagaagcaatcgatgaatttgttgacaatatcctagctgacattaaccgcaaatcacgtccagatgctgaataatacttccatttgcacaataatataaattcggcagaaaagaagtccaatagtgggcttcttttttacttgtggaaaatttttctgatttagcggaagaatcctatatatgcaaatttaagttaaatcacaactcctgcctagcaacgaggacgtttgcatgactttgaagaaaatttcttgatttagcacaggaattccatatatgcaaatacaaaattgaaaaccaagtcaatcaaatagtcttatttgttaacgaaaacgcttatataacccaaaatgacttatagataattaaataagattattctaatttatagaaaaatttcatatatgcaaaaacttaaaaatagacattatccatgctaaaataaatccacgcttgtgggaaaggagataaaatgaaaacaacaaaacaagtgttattagtattgtttagtgccattttaatggttggtatgacactagcgggaatgtctagtttgaaagtagatgcctcaacaacggtatcttggaattttaaaaactcaagtttcaaaaatcttggaacaatttctagcacaacgacggttgatggcttgacgttggtagcaacagatagcttgaccatgcaggttaaggctaaaaatgcgacggtttctggaactgattatacctatgctttggcgcttagtgggagaggtgaccaaaacggcagagctgtcaaggttccagtgtctggaaatgacgtgattaaagtaaccttgcaaagttcttcaagcacagacgcaagaactttgattgttgctgattcagcaggaaatcaattgacaacaatgtctgctgggacaacagctagcacacaatcttacacttatacaggtggtggggatgctatttggttgtattcacaagatagtggtattgatatttttaaaattcaagttgattcaaacgggacaagcagtacatcaactaccacaacaacttcagatacttctgcaaccaacacatcagacggtacagtcgtaacaagttattcggaattgctttcagcgattagcaaagtagaaaatgctggtggtggcaaaatttacgtatcagggacaagcattgcttgtagcggacaaattgcgctttcaaaagccaattcaaatgtccaaatcattggtgtacaaaacgcagacggtacttatccagaattggatttctcaagctttatgtcaagctatattggtaaagcgtcgtcagattcagcggttggtatcagaattacagggtcaaattatacgcttcaaaacttgattgtggaacatgccccagataacgggattcaaatcaagggaacaagcgcaggaaacaataaagtgtcaaactgtatcacacgttataataatgatgcaggtttgcaagtaacagcaggcgcttatcaaaatactatcgaatatgtttgcagttaccgaaactgtgatgtctatactcgtggtggtaatgcagacggctttgcaccaaaacttggtgctggtagcggcaatactttctcatactgctatgcttgggataattctgatgacggttgggattcatatgacaaatcaggtgacgtgacaccagacatcagctacacttattgtgcagtgtggaacaatggtaacccagatgtcttcacaggaaaatacgattttgacaatggtaactcacttgatgagaacctcttattggttcaattgattgaagctcaagacagttcttttgcaacaaattacgctaatggtcaattctcattgccaacaagtagctttattcaaacagatgcagggacagttagtccttctacttggactggaagttcttatgatggtaatccaaacggctttaaacttggttctgcttattcaacctctagtgcaacaagaacactttcttattgcttagcgtttgatgaatctaaaaaaggttttgacaacaataacagctctgttactggtaatttcaatcactgtattgcttttgacaatggttataattactatattcaaccacttacgattacagggtggtcagctgtttatggctttagtggaacaagtagtgataaacttccaagtggttattctgtcagcacaccatctactagcacacaatcttcaatcagaagcacagtagaaagcaccaagaatgccattattgcaagctgtcaagctaacaaaatcccaggaaaagtaacctttaatattttctaaaataaatgtaataacgaactctacttttgatgtaatataaatgagccccaaattggggcttattttttacagtaaaattagaggtaaataaaaattaaaatttactgattttttaattgattttttgcgttatataaactaaaatatttttgtggcaaaaatgttactcaaatggaggagatcaaatgaaaaaaacaaaacgcgtattgtcgttgatgtttagtatcctattacttgttgccatgacactaacaggagcgtcacttttgaaagcggatacaaacacacagacaacaacttcttggaattttgaggattccaattttaaagatttaggaacactgtctgatacgcggacagtcgatggcttaacgttggtagcaacagatagcctacccatgcaggtcaaggtaaaaaatgttactttgggagataaaagttttacttacgctttagcattaaacggcaaaggtgaccagaatggtagagcagttaaagttccagtagcagccaatgatgtggttaaggtgaccttgcaaagctcatcaagcacagaagcaagaaccttaattttagcagattctgcgggaaaccaattgagcacaatgactgcagatgttacggctaacacacaatcttatacttatactgggaatgaagatgccatctggttgtattcacaaaatagtgggattgatttatttgaaattgaagtagagtcaactgaaacaagcacgggtgatacagctacccctgattcaagcgctgatgaaacagtaacaattgatactaataatctttctgataatcaactttctagcgatcaattggccgaaagcaaggttgccagcaatgcagcgcaaaactatctagctgacggttggtattaccttaaaaatattaatagccaaaaatacttagatgtttcaggaaaacgagacgctgacggaagcaatgtgattcaatattcaggaaatggcggcgataaccaaaaatggtatgttaccaatcttggcaataattacatcactttgagaagtggcctatcaggtggacgaatgcttgatgttgctaacggtggacgtacagacggaacaaatattcagatttattctgccaatggagctgacgctcaaattttccaagttgttccaacgaaaactgccaatacttactgtttgttaacgaaatgctctggtggcacacaagcagtagatgtgaacggttggtctaaagaggacaacggcgacatcaaaacatggacttataatggctacgaatgtcagcaatttaagtttgaatcaacaacagcaaactctggtaacagttcttctggtggctctacaaatacatcagacggaacagtcgttaccaattacaaggacttgctttctgcggttagtaaagctgaaaaagctggtggtggaaaagtttacgtcaaaggaacaagcattgcttgtagcggtcaaatcgctttatcaaaaacaaatgctaatgttcaaatcattggtgtgaaaaattcagatggtacttacccaagattggatttttcaacttttatgaaccaatatattggcaaagcttcttcagatacagcggttggagtccgaatcacaggttctaaatacacgcttcaaaacttgattgtggaacacgctccagacaatggtattcaaatcaaaggttcaaatgccggaaataacaaagtgtcaaactgtatcacacgttataataacgacgctggtttgcaagtgactttgggagcttataaaaataccattgaatatgtttgcagctaccgaaattgtgatgtttacacacgcggtggtaatgcagacggttttgcaccaaaacttggtgctggtagtggcaatacgttctcatattgctatgcttgggataattctgatgatggttgggattctttcgataaggtaggcaatgtaacaccagatatcagctatacttactgtgcggtttggaataacggaaaccctaatgttttcacagggaaatatgactttgataacggaaaagctttagatgaaaatctacttttagttcaattaattaaagctaaagacagctcatttgcatcaaaatatgccaaacgtcaattctcattgccaacgggcaactttattcaaacagatgcaggaacaatcagcctttcagcttggacaggaagttcttttgatggtaatccaaacggctttaaacttggctctgcctattcaaaatcaagtgtgacacgcaatctttcttattgcttagcttttgatgaatctaaaaaaggttttgacaacaacaatagctcggttactggttactttaatcactgtatcgcctttgacaatgggtataactattacattcaaccattgaccattaaagggtggtcatcagttcaaggatttagcggcaagagcggtgataaattgccaagcggacgttcggtcagcacaccgtcatcaagcagccaaagctctattagaaaatcagttgaaagcaccaaaaatagcattatcgctagctgtcaagccaacaaaatcccaggcaaagtaacctttaatgtctttaattaatggaatggacagataagccacaggaggtcgtaatcgacctctttttaattgaagaaaaatttttccggtactttttatttcaaatcgttcttttgttgcctatttcgctcgaaaataatacctcatcacaagtgacaaaaataaataaaacttgtggttaaagcacgtctatcaacattctgatgtgatttttaatttttttaaatttagttttatggtaaaataaatgtaattttagacggagcaaaagggagtataggatttatgacaacaattaggagcgatagggaagttgcccagacgtatgccagtcaattggcaaatgcttgtcagaatctcactgctgttagtgaggtgacaaaagataccgtaacggaattagagggaaatacacgtcatcatgcggtgattgaccaagccaagtcctttttggcacaaattactgctgctgttgagacggcttctgaccatctgcattcggtggctagtgactttgaagcggttgaccaagcaggtgcagaaagttttgagggcgagcatgactgaaaaatgggaagcattgaatcgtaaagaacgccaattgtcttaccaattagaagatattgaaaatacccgctttcgagccgaacaagtgttgggagactttgaaaattatgactacggcggacgaacaatctcgttaaataatgcatgggatgctgcttatgggagtaagtatgcgacccaattgggagaacaaggcgaacaattacatgagttgagaaatcaagtctttgagacctttattgacggtgttgatgaactcaaacatcaagctcgtcaaatcgaagatgagatggaagccatttacgttgctaagcgcaaagaaagtttaaagtaatttagggggagattgaaatgggacttaacatgaccttagagcagtcacaggcacaagctgagagtgtcgctagtgtcagtcaggctcaaattgaaggctatcaagccttgcaacaagctattcagcaatttgcggatgacacagagagtttaacagggaaagcctatgaggcagctaaagcttattatcgtgccgttcttttgccactagcacaaggtggtgaactgtatgcggaaatgttagccaaggcgagtgcgaaactgcctgaaaattatcaagagagtgtggatactaagagttggagtgaagagcagctcttagagtacatccgtcaggaagaagatttgattaatcaactagatgagattaaccaatctttaagtcgtttagaactgccaacgacgcaaaaacgccaaatgcaacaaggcacggttgacttgattcgtggtcaccatgctaataaacgtgtctatgaaacgattttagaggacttacgagcttatagtacggattcggttcgtttatttgatgagttagacgatattgctttgcaactctcaacaggtttagcacaagcagaaactagttggaacgctacggacaagtcgtttacgattccaagtgatttaagctgggcgacttatttatcggcttattctgcgacgaaagatttagagcttagccgagaggaacgggcgtttgtcaataccatgatgacagagtatggctttgatgtggagaccgctaagcaactgctgaccattaagcgggggattgatagtcaattttcttattttgcgggttatacgtcacaggaacgcgattatatctttttacgcttgattggcgctgtgagctatgatggcgtgaagtgggatgaaacagctggttatttgagtaattatttttacacggagaccattagtaatttctttacaggtgatacgcaaaaagtgccgatgtcacttttagaaatctttcaagtcttaggacttagtgagcaagaagccaaagaattgaattataatctccgattgcaacatgaaatggctggtggaaaatacagaagttctcaatacttgaaaactaatgatatagatttctataaaaatgctaaaaatacctataaaagtatttatggttcggcaaaaggttttgatgacttttgggatgaacatttaaaagcttattctaataatagagcaggaaatgcagattttacgcaccaatccattaccatggcaacacacttgaatccatctggtctgcaattatcggatttttatggtggtcgagagcatgtgaaagctttagctggctgggagggtgataccacctataatgccaatgatatgaagcctagtattggtgaagatgattataaagctgacttggacgctgttaatatcgttggtcgaatggcacaagggcaatcttatgaacaggcaatgagcagttattatagcgatgtgactaaggatgagaccgttcgtgaaaaagaattcttgaaaaatgaagattgggataaggttaaaggaaccatttatgcgagtctagttcctgttgatattcgtagaaaaggcgaagaagcgacaagaaattatatctttgaacgctatgaaggtgttccagaattcttagaccgtttggaatcagtagcgggagaataggagaattatcttatgcaaaagaaagtgattagtttagtcattttatgtgtgattgctttgtcagctggggtttattattatattcatcaacctaagaacatctttgatgaaatctatcaagagacaaaaaagacatatcgaagcaataatattttaggacagattgaagattttgagatagcagaatggtggccaacggatgatcctaatatttcacagacaccttttggaacttataatagtgaaaaacttactgatgattactattatgatgtttctattgattttaactttaaaagaaaatataaaacaatgttgatttcttttaagaaaagagcacattcaaatacaaaagtatggcttttaagtaagtacaattcaaaaactaagacccttaataagtctattcaaatcattttagaaaacggtgattcaaatagctacatcgaagacgaatcaaaagtgaaatcttacttgcaagactacggcatcaccgccgctgatttagagagttattataacgaaattgtcaatcaaaaagtgttaacagactggtgttcgatttacgatagtaaattttcgcctggagattacggtgatgtgactgttaaaacacaatgggaaaattggtaaactttatgaaaaagaaaattattagcttagttgtcttatgtgtgcttgctttgtcagctggggtttattactatattcatcaacctaagaacatctttgatgaaatctatcaagagacgaaaaagacatatcgaagcaataatattttaggacagattgaagattttgagatagcagaatggtggccaacggatgatcctaatatttcacaaacaccttctaggttatacaatgagtcagagacaccagatggctattctaatattagaatcggattcaattttaagcgaactcaaaaaacagtatcagtatcttttcaaaaagaattggattcaaaagttagcttgtcgctatggagtatgtatagcgctaaaaagcaaactttaactaaaacggtagaaattttaataaaagagaatgattcaaataattatattgacgacgaatcaaaagtaaaatcttacttgcaagactatggcatcaccgccgctgatttagataattattataacgaaattgtcaatcaaaaagtgttaacagattggtgctcaatttacgatagccaattctcacctgaagattatggcaatgtgactgttaaaacacaatgggaaaattggtaaactttatgaaaaagaaaatcattagtttagtcatcttatgtgtgcttattttgtcagctggggtttattattatattcatcaaccaaagaacatctttgatgaaatctatcaggaaacgaaaaagacgtatcgaagcaataatattttaggacagattgaagattttgaaattcaaggttcatggtcaacagacgattctaatatttctaaaacaccttttggaaaatacaaagccgatagcttaccagagggatattcagaaattgaaattagttttaattttggtgaaggtattaaaggtgagagcgttcgctttgagtggcaaccaaattccgatattactatttggtatttaagttattataagcgaaatagtaagacgcttacaaaagaagttgctatttttgacgaaccaagaaaagcgggagagtatattgatgatgaaactcaagtaaaggcatacttagagcaatatcatatttcaagtgttgatttagataaacattataacgaaatcgtcaatcaaaaagttctaacagattggtgctcaagttacgatagccaattctcacctgaagattatggtgacgtgaccgttaagacgcaatgggaaaattggtaaactttatgaaaaagaaaattattagcttagttgtcttatgtgtgcttgctttgtcagctgagatttattactatattcatcaacctaagaatatctttgatgaaatttatcaggaaacaaaaagaacgtatcgaagcaataatattttcaatcaattagatgatgtagatgttcataagtatcaagaatatagcagtgattcaaaattctaccctaacataacttatcatgatgaagttttttcagaagattatagtaatgtacatttgacttttcattttacacaagatacaaaaacagtatttatttcatttgaaaaagaaatcacgacaagcatacgtctttggatttttggtaactattctttaaatgagaatttatttcagaaagatgttcaaatcattttagaaaacggtgattcaaataactacatcgaagacgaatcaaaagtgaaatcttacttgcaagactatggtatcaccgccgctgatttagataattattataatgaaatcgtcaatcaaaaagtgttaacagactggtgttcgatttacgatagtaaattttcgcctgaggattacggtgacgtgactgttaaaacacaatgggaaaattggtagtttaactttatagtaaaaaacgactagaaaatctctagtcgtttttgctatgttagaaatggttattttaaagtaagtgatattctttgagtaattcttcaatataagtgccgtgaatttttttgagtgcttctttaagaacggctttttttgcccaaggaaaatcaatttcagttagtgatttttggtcattcaagtaataaagtgcattgagcatcatgcgaatatcgaaggccgatgcaaaaacttctggaacgccacggtcaacatttaataatgtatagacggcttccatggctgttctgacagaatactctgtggtaaatacggtatctttgggagtttcggcataatttccgatgaaagcaaggtttttactatgttctggtacgactagaggacggtcttttaagccacgtggcatgaaatatgttgtaatataaggcatatggcaaggaatagtagaagctgcttcagcaatttccttgatgtcagtttcaggaactcccatgtgataaagccattcttggcaaagctccttaccactacattcatcaggtcgtttttcgatatagtttcccttgcggtcagtataaagtgcgtagagccaaacgactagctcattttctttttgagctttaaagtgtggttggcgactgattgaataacctaagagccaattagagtctttgatactcgttggtccactagtcacaattgagccactataagggtctttatgattaatattttcaatataagacgcaatgcgtttgtctttaaacgtgatagtggcagaaattgtccaattgctatcagggatattttcgcagaatttttcaggatgaccaaagtccttgtcttgggcagctaattttttccataattcccaacttgctcccaattcatgtgtagtaggggctggatggtcattgtcaccgtaagtgctactttctgtgatagagccatttgtgacaaaaacaaggtcatctttagttaaaaagatttcttgtgcttgcttgtcttttgtgaattcgatttttgtagccactttatcgttaccagtacgattgatgagaatattagtaactgttgtattgtagctaaaatcaactccgtgttcttgtagataatgaatcattggtaaaattaatgattcatattgattaaattttgtaaaacgtagagaggataaatctttcagtgcatcaacgtgttgcacaaagcgcatgaggtagcggcgcatttccatagcacttgaccatggttcaaaagcaaacatggtactccaataaagccaaaaatttgaagcaaagaattcttctccaaatacttggtcgatttggacatcttctagttgcttttcaggagttaagacgaggtcaataatttctttaattgctgtttcagaaagtgttaattgcccatcatcaggaatggcttttccacgattatggatgacacgtgttttagcgtaacaagggtcttccttatttaaccaataaaattcatccaaaatggagttttcaggattttcaagtgaaggaatagagcggaataaatcccaaagcacttcaaaatgtggttccatttcacgaccaccgcggataatgtagccaagacggtcatttttgataccatccatactaccgccaggaagacttaattcttctaaaatatgaatgtgctcaccaggcatctgtgcatctcgaataagaaatacagcagtggatagggcagctaacccacttccgacgatataagcggatttgttttcaacattttcaggttttttaggacgtgcaaaagcttcgtaattaccatttgaatagtacataagcgtaactccttttctattattgtctccattaaaacgcttttttcaagcaaataaaatagacaggcggtcgctcctgtctagaattttgacaaataaaggattttgtctaattaaagtttttccagtaactgatagatatgttgtaccagatcttgtggattttcttgcaagccagaatcaatccaatctaaaatgaaaccaactagcccatatttataaaaatgactgcggaaatcaagttcttcttgtgttaattcaagttctttttccttgagaacaggcttaatcaattcataagctctgtcatataaaaagtgttccaagtaattacgattaacagaataataagtattgcagacaaatgctttattttcttgaatatagtgaaaaatagcaagcattcctttttcccatgaatcatccgttcgattatcaccaatcatttgctcaccgtcagcaatataaatctgctctagcaaatcgtacaaatcattataatggtaataaaaggtttgacggttaacatttaaacgttgtactaattctgtcacagttaccttatcaaaggatttttcctgcataatctcttttaaagcttttgcaaaagcctgctcagttaaggtattcataacttctcctctatcgtgatgttcttattctaccattatttgccaaagataacattgtaaaaaagttcttccgttagatatagtaacgtgaaaatataaatgcttaatttaagggtattttgaactattttttatatgtgtagtaaggaaactaaccaagtaatatatttttaatcaattaggtatagaataaggttgttaaggttttttatttgcatattccaaattggtatcttataatataccataaaagatatacaaagaggtatgatgttatggctttagcttatgataaaagttacaatttaagaacttatcaaaaaatttataatcaagcagaaaaagtatttaaggaaaataatttaaataccgctcaggctttaaatttatttctaaaaaatgttgctgaaacaggtcaacttaatttgaaaacagaagaagaacttaaaagagaaaagttgtttaagaatcttcaagcagagattcaacaaagttatgctgaatttgatgaagggaaattttatactgatgaggatttggtagaacgctatggattataagaagtacaagcttatctattctcaaagggtcattgacacgcttgatgatatttatcattatattgctaatgaaatagactcaacaattaacgctaaaaagaaaattgcaagtattaggaaagatttacaacgcttggagttttttccagagggtggttttgatgctgatgaaaaatttggaaagtgtctggatcccaagtataaaacaagaggtttaacgttgagtaaggactatattgccttgtataatattttggaaaatgaggttcgtatagcatatttgttacctactcgcagtgactatatggatttatttagataagttacaataacactatgaaaatcggagataaagcattttttagtttttgggaagatagcagagctgtgacaagtgccaatcaggcaaaggaagtcttggagaaagtcatggcaattgctcagatgcctttagaattaactgggaacgtcagccagacgcgcgagttaataaatcagttttcggataacttggcaccagaccatgtcttttggcaagaatttgcagaggttgtccaacttgcctttccagcagaaagcatggcagccgataatttactggctcaccaaattcatcaatttcgttatgtgatttctgcctaccaagcacagtgggtacgagaatattttccagctcaaaatgaccgtttatccttgttgacttatctaaaaggaaagaagaggcgacgtttttggcggaaacaatttgattttgatttaacagaatcgtcacgccttcacaataaagctcctaaacagcctattttgggattttcgttacccgttaatttgaaaattgtaatgggatttcacacggaatttatcctagatagccaagggcgctttgcaaatgaaattgacccacagggtaccaatcataatggtattatcaacggtgctagttttaactatgcgagtcagaatgacaaaaggcattatgaacttgatattgctcccatcaaaccacatgatcctgcatttcggaaacaaatcttagccaatcaaggcaatcgtttttcagcgccacttttaattaaaaaacgccaacacgaacaatgggagcacagctattttaataaaaaagggcattatgcccaagcagggaaatctgcttatcagcaagtcaaagtcttgcgacgctccttccagaaggaattaagaaagttgaaaaaataatagaacaaatatgaggtatttctgtggcaagtccagttgggcttgccatatttagtgcaatttatggtatgatgaatgtaagaatttacgttttagaggtgttaaatggctaaagtttatgtggcagatgatgaaaaaaatattcgtgaattgattgcatcattcttacgtgaacaaggacttgatgttgagattttcgagacaggagaccaattgttgctgcgttttatggaagaagaagcagatgtagtgattttggatgttatgatgccagggacaaatggtgttgagattgcaaccatgcttcgtaaacgctctgatgttcccattatcctactgacagcgcgtgatagtgatgccgattttgtcaaaggtttttcagcaggggcagatgattatttcaccaagccattttcaccgttaaaattaagcttgcgcgtgaaagctattttggcacgccaaccgcaatcgcaagaagtggctaaaggaacctcagatgtcgtgacttacgaagcgctgaccttatccgagaaagaacgcacggtcacctatgataatcaagtcttaaaactgaccaatacagaatttgaattattaaaaatgctgatgaatcatgccgaagaggctgtttcacgtgacgaacttttgcatcatatttggggatacgaaagtagcatagaaacacgggtaacggatgataccattaaacgcttgcgtaaaaaattgagaggagtcgatagtcatgtccttattgaaacggtttggggctatggtttcaaactcacgaaaaaacaataaaaaacagctcaatcacccgaaaaaaatattgcagaaaaagcgtcgaaatttgcgtttcaaaacgacattatttgtccaacctttaaccattattatcgtttcttttgctattattcttttagtatttaatgtgcttttgaaattatttattgctgagcaggcatttacagctgtacaaaatcaatatgatactttggacaccttatatgtcggtgatactccagaaacgacagcagaaggaaatatttttgagactacttatgtcattgcagacgactcttttgatatcaagtacatttcagcttctatgtacgatttatcagagaaaaaaatctctgaaaagattattgattatttttcagataatgacgatattgaatggtttgatgatattgatgaggatgatgcagactataatgattaccaaaatagtttaaattactttaaaaaagttgaaattgatggttcagcttacatgatcaaaatgcaggaatatcctggcacattagcagacagttatgtcaaacaagacaataatgacgattctccaacgtattatattttcgtttttgctaatgtcacaccgattgaagaactggaagattatattaattttatattattaggtttgatggttattgtcggaatcgttgctagtatcagtatttttcttaccgctcgaaaacttgaccgaaattttggtagtttgaaatcttatattttacgtgttggcaatcgcgaaaaaaacttgccaacagaaaactttgcctaccgtgaatttaatgaagttgggcaaactgttgagcggatgaatgatatgattgatgccaaccaacgtagtcaacaactcttctttcaaaattcttctcatgaattgcggacgcctttgatgtctattcaaggctatgctgaaggtattaaagagggggttattgatgccaaacaagcagctagtgtcattgttgatgaaagtcagaaaatgactgatttggtggatgatattttgacactttcgaaaatggaatccgtccaaacacaattacagcttgaaaagctgaatattacagaccttctttatgatgttagttggcgcttgaaagccaaagctgatgaacgtggcattacctttgaacatcactttgacgatgattatttggaaatagaagccgatgaaaagttattggaacgtgcatttaccaatattttatcgaatgctgtccgctacgctaaaacacaaatcagtatttcaggaaagctgatagaaaatcaattacaaatcactatttcaaatgatggcgaagctgtttcagagcaagatcaagagcacttatttgaacgtttctacaagggaaaaggtggtcattttggcattggacttgccattaccaaggaaattgttgagcgccataaggggacaatcactgtaatctcaaatgcccaagaaacgagtttcattatttatttgccagtaaagtaacgaggtaataataaaaaatacgaagctgagcatcttgtctcaacttcgtatttttgttctcatttagtctacctcaaatctttcaatcgtcttacaattttgtaagagcgcaagtgctgaaatctagtaaactagacttagaagaaattgccacacttttgccacagcttttcgatactttagccgagatttttcaaaaaagcttggttataatagacatataatatcgaagagaggaaaagatgacagtttcaaaaaagtttaaaattggtttgatgagtgtactagcagtgattttgataatcttgtctatctacgcctacaataatcttggttacactttaagtagcaaagaagcttatcaaattgcttatcaaaatgctggcgttgcaagcaaggaccttctctcaaaatcttttgagaaaagtcgcttgggcttaaaggcaacttatcatattaccttaaaaactgaaacgacggattacagttacaccattgatgcctcaacgggttctatcatgcaacggcaatttcacgaaaagtaactgttaagaccttttaatttaagatattattttaatgaaacgaaagagacatggcatttagctgatagcagctaagtgataaggagactaaaatgaaaaaatctaagaaatcaatactttatatattacttttactggttttaccgttagcacttattgtttatcttttagaactatttggtctgaagattattagttggcgacgttgaagcgatactttcatttttgagacaagggaggggaatctatggtagaagctggaactcagagaaaaaatattcaaattttaaccggaattggttttatcatttctattggattgttaattttctttaaacaacacccaacatatttccaagttggaggaatctttcaaagttaccttggacaacttgggttctttgcaccgcttatctttatgctcttgcaagtgattcaagtcgtttatccgattattcctggtgggatgacaagtgttattggttatattgcatttggacctatctggggatttatttataactttactggtatttttgcaggttctctattagctttcgggcttgctagacgttatggtgagacttttgccaaagcctttgtctcacaagaaacttatgataagtatgtcggttatctagaccgcaatgatggtaaattttacgctaaatttttaggagcagcctttgctctaccaggttttccagatgatttcctttgcatggtatctgggctttcaaaaatgacttggaagaaatttatcacgattttccttattaccaaaccagtgacactttatatttacaccgttgtggcgtataaagggttgaactatttattaacactattccattaatgatttgattgaataaacaataacttctttttgacatatgacagcaaaaaatcccttactcaatgtgagcaagggatttttgtttgatttattattcggcagctttttcccattttttagccaatcggcgtgaaattgttgaaatggtaaagttaatcacaaagtaaatggcagcaatcaaagcatatagtgtaaaaacttggtctgcttcaaagtaacgtcccatcaagatttggcttttaccaaataattcttgaatagcgataactgaatatagcaatgacgtatctttgataactgttacgaattgtgaaatgatagctggcagcattttacggaatgcttgtggaaaaataatgtaaatgaaaatctggaaatttgtcatcccttgtgctagaccagcttctgtttgcccatcatcaacaccatttaatcctccacgaatgatttcagcaagagcagcagaagtaaagacagtgaaggcagtaattcctgctggtgttgatttcatttgaaagacaaggaaaataatgaaaatccaaagcaagtttggaacattgcggacaaattcaatataaatacttgaaatccaacgaagaatcggattttttccgttacgcatgacagcaagcactgttccgataagtgttgatagtacaattgaaataaatgaaatataaatcgttagccacaatccttggaggataaagctaatgttggtcggtgttaatactgacatttattctcctcctaaagtgaatatgatttcttgttttcttcttctttacgacgtgcccatgttgcaagagggaaacacataatgaagtaaagaagtgctgcaccagcaaaggcaggaacataattagttgtttcgtatgcccaagctttcgctgtaaacatgatatctgctcctgagatgatagcgaccgttgatgtatttttaatcaagttaaccacttggttagtgagtggtggcaagattgtacgcaccgcttgtggcaggataattaaactcatggtttgactataagtgaatccttgtgaaagagcagcttctgtttgcccctttggcacagcttcaatccccgaacgaataacttcagcgatataagcaccgtggtaaatcccaacgcaaagaacagctgtgaagaatgttgaaatcatgataacaccgttagtcataatggcaagaccgtaataaacgaaaacgaattgcactagaagaggtgtattctggaaaacttcgacataaacacgggcaattgcttttagaactctattcttagatgatgacatagcaccaaagataacccctaaaacaaaggctaaaatcaaggcgcaaatagacattcccaacgtatataagaagccttttgcaaattcaccaaaattggcaaagaaatctgcccaacgtgagagggcaaatggacttgcagcttcggttaataaaaacatgtcaatctctcctctcttaattatcgtcagccgttgcaggcgttaaatcgtatttgtcataaagtttttgcaaactaccatcagctttccaatcagcaagtaagtcattgatgtaatcaatcacagactgattagattttgttgccgcgataccgtattcttgggtgttgaacccttcgtcaatgatttctgttttcttgctgacataaccagtcaagatagatttatcaacagagaaagcactgatacgattagcataaagtgaaatggctaattctggatatgaaccgagttgaacaaaattaaagcttagattgtgtgcttcaccatattcttcaatagctgatttagttgttgaaccttgggcaacaccgattgtcaagccgtccaaatcagcaatactatcataaccttttgatttattaaccaagaaaccaatctcatcataataataagggtcagaaatcgcataagaagcctgacgttcttcagtaatggtataagttgcgatcaagatgtcaatttgcccattatctaaaagtgcttcacgtgtttgagcagtaactgctgtaaatgaaactttaacccctaattttttagcgatttttttagctaaatcaacttccataccttcgtattttccagtttcggctgaataataaccaaagtttggaacgtcttgtttaacaccgacttttaaaacgccagcgtcttgaattttcttgacttgttcagatacgctatctgcaaatgttattttgccagcaaaaagtgtcaataaaataagtgacagactggctaaaatggctaaacctagttttttcttcataagcatctccttatttctgagagacagtgtcacttgtgtgattaatgactttgctcaagaattgtttagcacgtggttcagttgggttgtcaaagaaaccttggacatcagtagtatctaccaaaatttctccttcagccataaaaataatgcggtcagcaacttcacgggcaaatcccatttcgtgcgtgacaacgaccatgttcattccttctttggcaagattttgcataacagcaagaacatcaccgattgtttcagggtcaagagcagaagtaggctcatcaaaaagcaataactctggttgcattgccaaaccacgagcaattgccacacgttgtttttgtccaccagaaagcattcctgggaatgaatctttacgatcccacatgttaacataagtcaagtattgctcagcgatagcttcagcttcttgttttgatttaccaagaaccttaattggtgccaaagtcacattttctaacaccgtcttatgcggatataagttaaaatgttggaataccatgccaacttctttgcgaagttgcacaaggtctttagctgttgcagaagcaacctcatgttcgtttacttttaagctccctgtgtcaatagattcaagggcattcattgtacggataagtgttgatttaccagaccctgaaggacctagaagtacaacaacctgacctttttcaatttctaagttaatatttctaagggcatgatattccccgtagtatttttcgacatttttaaattcaattagtgccacacttgtctccttttcaaagataagatttctttgtcagataatcttacatctgacattataagttagtttatattaacataaggggtaccaattgtcaaatatattcagaaaatttcaacaaataaagggttaaaaataataatcttattgtttcaaatgttactttatgatgtcaaaaacgcccaatgtttccaattaaagtcgaattttgatataatttagggtagaagtcattttggtgactaaacatgaaatcgttgtttgagaattttttaataacttacgaagaataaagaggtgacatatgaaaaaaattcttatcgttgatgatgaaaaaccaatttcggatattattaaatttaatttaactaaagagggttatgaaaccgtaacggcttttgatggtcgtgaagctattacaaagtttgaggaagaagatccagatttgattatcttggatttgatgttgccagaattggacggacttgaagtggctaaagaagttcgcaagacaagtcatattccaatcattatgttgtctgctaaggatagcgagtttgataaagttatcggacttgaaatcggtgcagatgactatgtaaccaaaccattttcaaatcgtgaattgttggcgcgtgttaaagcgcaccttcgtcgtacagaaaatattgaaacagcagttgctgaagaaaatgcttctgcttcaaattcagaaatcacaattggcgacttgaaaatcttaccagacgcctttgtggcacaaaaacgtggtgaagatatcgaattgacacatcgtgagtttgaattgcttcatcatttggcaacacatatgggacaagtcatgacccgtgaatatcttttggaaaccgtttggggctatgattattttggtgatgtgcgtacggttgacgtaaccattcgtcgtttacgtgaaaaaatcgaagacacaccaagccgtccagaatatattttgacacgtcgtggtgttgggtactacatgaagtcatatgaatgatacaatgttacaaaatttaacttattttgaacaagccattctctttcttttagcatttgtcgcagtttattttgtttatttagcgataagagattatcgaacttctgttaatattcgacgtttgagtggtaaagtgcgagagcttatcacaggaaaatacacagaagatattattattgaaaaagatagagacttagctgagttagctgaccaattaaatgatttgtcaacagtctttcgtttagcgcaggaaaatttggcacaagaaaagaatcgtttggcgagtatcttatcttatatgacagacggtgtcttggcgactgaccgtgctggaaatatcacaatgattaatcagaccgcgcaacaacaactcaatttagagcgtgaagaagctttgcagatgaatattgttgatattttgggttctgatagcacttatagttatcatgatttggtgtcaaaaacacctgaaattgtcttgaaccgtcgtgacgaaacaggtgaatttatcactttacgtattcgctttgctctaaatcgtcgtgatagtggttttatttcagggttgattgccgttttgcatgacacaaccgaacaagaaaaagaagaccgtgagcgtcgtcttttcgtttctaacgttagtcatgaattgcgaacaccattaacatctgtaaaatcttatctggaagctttagatgaaggagcgctcaaagaagacattgcgccaagttttatcaaagtatctttagatgaaacaaaccgcatgattcgtatgatttcagacttgcttaatttatcgcgtattgataatcagacggttcaattggaagtggaaatgacaaatttcacagcatttatgacatcaattcttaaccgttttgatcaaattaaaagccaacatacaatcagcggaaaacagtatgagattgtcagggactatcctattaaatcaatctggcttgaaattgaccctgataagatgacgcaggttttggataatatccttaataatgctatcaaatattcaccagatggtggaaaaatcacagttagcatgaaaacgacggaaacacagttgattatctcaatctctgatgaagggcttggtattcctaagaaagatttgccattgattttcgaccgtttctatcgtgtggataaggctcgaagtcgtgcccaaggtggttcaggacttggcttagctatcgcaaaagaaattgtcaaacaacataaaggttttatttgggcacaaagtacttacggaaaagggtcgacctttacgattgtacttccttacgaaaaagattctgaaatttatgatgaatgggaggatgaagaagagtagatgtctgaaaatgcttttaaatatagtattttagcctccggttcaactggaaattctttttatgtggaaacaccacaaaaacgttttttgattgatgcgggtttgactggtaagaaaattaccagtcttcttgctgaaattgaccgcaaaccagaagacttagatgctatttttattacacacgaacattctgatcatatcaaaggggttggggtgttagcacgtcgttataatcttgatgtttatgcgaatgaaaaaacgtggcaaatgattgatgagcgaaatatgatcggaaagcttgatttagctcaaaaacatctttttgaatgtgggaaaacattgacacttggtgacattgatattgaaagttttggtgttagccacgatgccgttgagccacaattttatcgtttgatgaaagataataaatcgtttgttgtcttaacagatacaggttatgttagtgatcgcatggcaggaattattgaaaatgctgacggttatttgattgaatcgaatcatgacgttgagattttacgttcaggctcttatccgtggagtttaaaacaacgtatcctatctgataaaggacacttgtcaaacgaagatggtgctgggacaatgattcgaaccattggaaatcgcacgaagaaaatttaccttggacatttgagtaaagaaaacaatatcaaagaattggctcacatgactatggaaaataatcttattcaagctgactttggggttggttatgacatgaaagtctttgatacctcaccagacgaagcaacaccattaacagagttataaaagtttaggtttgtgaaattgtttttttgacacttcccttaggtggtgtggacggcaggttcgacagtccagtggactgtcgaaggaatccaaggaattccatgcctaagttttgagcttgaaatctcaaaacttccgtgcggctgtttttattgatgattcagccactttcaccacggcgggaagtattgttttgttgggagcaaagcttgcaaagagttctaaaattgaacaaaggtaataattatttgtaacttatttttggttatatagtaagtttgattacattctaactgtccgttggacagtttttattgtgtatttacactataaattcaagaccaaaataaattgcattaatatagaaagaaattaaggggattttttggagaaattcccttttttatgacttttctggtataataaaatagtctatggtagaaaaagcgttttaatcactcaatgaatgattgaaaagaaacgttttaataagataaggatatagactattttttgaagggagatttatcatgcaagctttagatacaaaacttcagcgagatttcggaattgtttttgaagataaaactttgctagaaacagcttttacccacacttcttatgctaatgaacatcgcctcctaaacatttcacacaatgaacgcttggaatttttaggagacgcggttcttcaacttttgatttcgcaatatctgtttaaaaagtatccgaaaaaaccagagggagacttatcaaaaatgcgttccgtcattgtacgtgaagagtctttagcaggtttttcacgttactgtggatttgatgaatttatcaaattaggaaatggtgaagaaaaatctggtggtcgtaatcgtgatacgattttaggtgacttatttgaggcatttcttggagctttgttgatggatcaaggtgttgaagccgtcaataaattcttaaaccaggtgatgattccacaagttgaaaaaggtaattttgagcgcgtgaaagattacaaaacaacacttcaagagttgttacaaggtcacggtgatgtgacgattgattatcgtgtttcaaacgaatcaggaccggcacacgctaaagtctttgaagtgactgtgtacgttaatgatgaagccaaaagtcaaggaatcggaagatctaagaaattggctgagcaagatgctgctaaaaatgctctagccttgcttcaataagacatttgaaaggaaattgatgaggcaaatgtccaacctgtcctaggcgatatgtgataaacctaggaaaagaaggctagttaaatagcttcttttcaggaaggtaatttgcctttttatctcttattttatgtatttaaaagaaatcgaaatgcagggctttaagtcctttgcagacaagacaaccattgaatttgataagggagttacagctgttgtaggtcctaatggctctggtaagtccaatattacagaaagtttgcgttgggcgctcggtgaatcttctgccaaaaatttgcgtggtggcaagatgctagatgttatttttgcaggaactgagaatcgtaagccattaaactatgcacaggttattgtgaccttggataactctgatggctttattaaagacgccaaagaaacgattcgtgtagaacgtcatatttatcgtaatggcgacagcgagtatttgattgacggacgtaaggtgcgcttgcgtgatattcatgatttatttatggatacaggcttgggacgtgattcgttttctgtgatttcacaagggcgtgtcgaagaaattttcaacagtaaacctgaggaacgtcgtgctatttttgaagaagctgcaggtgttttaaaatacaagacacgtaagaaagaaacccaaaccaagcttaatcaaacacaggataatttggaccgtctggacgatattatctatgagttggaaacacaagttaagccattggagcgtcaagcacaagtggctaaagaatttcttggcttggaagatgagcgtaagcaacttcatttgaatattctggttgaagatattcaggcggataaggagcgtttagcagaattaaatcagtctttaacagctattaaagctgatttgacagcttattatgaacagcgccagcaatttgaaagacaaaatcaaaacttgaaagaaaaacgtcatcaattgtctgaagaaatatcaagaagacaagaaggattgcttgatattaccagagcaatttctgaccttgagcgccaaatggatttgattgccttagaatcaagtcaaaaagaagagaaaaaacaagctgcaagctcgcaattggctgatttgaaggaaaatcaagcgagattaacagaagaattggcacaaaaagagcagcaactctcacaattagatgccaaattagcccagacgacagctgatattcaagcattgcaggctgaattagaccgtttttcaaccgacccagaccaagttatcgaaaaacttcgtgaagagtttgttgggttaatgcaaaaagaagctgatttatcaaataaactgacagcaacgattgctgatattgacaatcaaaaacaattgtcagaatcaaaatcagaagaattggcacagacacaagaaacgctagcagaagtaaaattaacggcaaaagaagctttagaaaactttgaagcagctcgtgaaaaagtcaaagccttgcttgatgactaccaaacgttacacgtgcaaattgttcaagccgaaaaagattaccaactagagcaaactaaaatgtttgaccaattggatgttatcaaatcaaaagaggctcgcaaggctagtctggaatctattcttaaaaatcacagcaatttctatgctggggttaagtcggttctacaggcttcaagtcagctaggtggtattattggtgcggttagtgagcatttgacatttgagcgagattatcagactgctcttgagattgcacttggtgggtcaagccagcacgttattgtcgaagatgagggagcggctaaacgttcgattgcctttctaaagaaaaatcgtcaaggacgtgcgacattcttgcctttaacgactataaaatcacgtcacttatcgcaacaaaatcattcgattttggcttcaagtcaaggttttcttggtgttgcaagtgatttagtttcatttgataatcgtttggaaaatatcttccaaaatcttcttggggtaactgcggtttttgacacggttgacaatgctaataaagctgcgcgtgcgcttcgttatcaagtgcgtattgtaacacttgatggtacagaaattcgccctggtggttctttctcaggtggggcaaatcgtcaaaacaataccacatttatcaaacctgaactagatgatcttgtggctgaattacaagacttgcaagctcagcaaatcaaacaagaaaaacgtgtgcaagaactccaagatgctttgagagctaataaggaaactttagctagtctcaaagcgcaaggagaggaagcgcgttttgctgaacaaaaagcagagcttgaataccaacaattggctgaacgcttgaacgacattaaccagctttgcgaacgcctgcaagaatcagaaacagatggtggttcacatgatttggaatcacaaaaaacaacacttgaagcagaattagcagaaatagctgcgcgtaaacaagctttaacagttgaaattgagcaaattaaggaaaacaaaaataccattacgcaaaaagttgaagctttgcgtcaacaagtgtcacaagcaaaattagctgaacgcgagttgttgagtgagcgcaaatttgaatcggctaacaaaacacgcttagaagttagtttagctgaaaataaagctgaaattgcaaaatgcgaggatttgttagcttaccatgctagcgataatcagactgaaagtctgccaaccttgcaaaaacaacatgatgaggctgttactagaaaagccagtgaagaagaatgcttagttagcctccgttttgaattggaagattgcgaagctaatttagaagaacttgaagaacaagttgcaaaagaaaatcagaaaaatgaggaattgattcgtcagcaagcgcaattagaagctcaaatcaatcaaatttctgaccgcttgcgtaccttctcacatgatttgacggaagattatcacttgactttggacgaagccaaggaagctagtcaaccaattgataacatggaaagtgcacgtcaacgtttacaagaattgcgccgtcgtatcaaggcattgggtccaattaacttagacgccatttcacaatacgatgaagtgaacgagcgtttgacattccttaacgcccaaaaagaggacttggttcactctaagaatcttttgcttgatacgattaatgatatggatgatgaagtgaaaacacgtttccaagtgactttcaatgctattcgtgattcatttaagcaaacctttactcaaatgtttggtggtggttcagctgatttatcactaacagaaggagacttgttaacagctggggttgagatttccgtgcaaccgccagggaagaaaatccaatcacttaacctcatgtctggtggggaaaaagccctctcggctttagctctgctatttgccattatccgcgtcaaaaccattccattcgtcattttggacgaagtggaagctgcgcttgatgaagctaatgtgaaacgttttggagactacctcaatcgctttgacaaatcaagtcagttcatcgtcgttactcaccgtaagggaacaatggctgccgctgatagcatttacggagtaaccatgcaagaatcaggtatttctcgtatcatttctgttaaattaaaagaagccgaaaatctagtggaatgataaaatccactcttgagttttagcaagaataacaaacaacctcccaactagaatcagttgggaggttttgttgtattcaaaagttttagtttgttatcgcagtttctgtttgtgattctgttgtttcgtcagcttggttgtctgatgaagaagttgtgagtgtgtcatcactttcttcttgattatctgagagttctgctatctcagattcggtttgtgtgttctggctgtattggtctgaaactttgtaaaagacattgctgacaaattgattagttgattcataatcaaaacggctaccttgtgttgcaaagaggcggtcacgaccgtaatcagacgggtcagtctctgttatgccaaaatgccagctaggaatttggctaccagcagcgtaataatgtaaaatgaaaccacctccactttcagtataaacgttagaaatagcttcaccgttttcatcataaacgagagcagacaagattaatttgtcgtcaataataccttgtggtgaaaattcaaaagtgtaaccattagcgtccatccatgtgccagcaagacttgagaaatctgattgcgctagcgcattgaaatcaaattgactagtctgttgactgacttgacgggtgctaataagattttctccgtcttttatcagttgctctgtgacttgtttttcagtaggtgctttcagcaaatccgcgcgtttgctagcaacgtggttctgtgtttttgttgaagagtttgttgattttgaaagttttttctgagagtgatgatgttggctagaaaccgtagaagtgtggttgtgatttgaatggtgttttagagtaatgacaccgccaccaaccgcaagcagtaccaaaccagacactaggaagtatgatgttctttttttcattgtaatcccctttatttttaacttcactatatatattcgaaaaagaattttaaaaactggaaaaaatttcagctttatttagaagattgaaaagaatgtgttattagcaagaaaattgctgtgttttttgctaaaatagaattatgtaattctttaggagtataataatggtaaaattagttgcaacagatatggacggtacgtttttaacaagtaatggctattttgatagtaagcgcctccatgatattctagaaaaatttgaaaaaaataatatgctatttgtcgcagcgagcggacgttcacttatggctttggaaaaaatgtttgctgagcatgctgataaaatggcatttattgcggaaaatgggactttggtaaaagttggtaaagacattgtttttgaatctggtttgagtaaaaaacaatatttggaggtcattgatacccttcttgaaagtccatatatgttaggttatgatttccttttatcaggtgaaagtggggcttatttacatccaaaagctagtgatgattacctgaattttattagcaattattatgaaaatgttcaacgtgtggctgatttggcgcaggttgaagataatattttaaaagtcactgcaaacttttcagaagatactgttcgtcaaggcgaagcatggtttaatggacgtattagttacgcgcaagcggtgacgacaggctttaaatccgtcgatattgttatccgtgacgttaataaacgaacaggactagaagcactttgtcaaacctttaacatggataaatcagaaattgtggcgtttggcgacaatcttaacgattttgaaatgcttgattttgctgggactgcaattgcgacagaaaatgctcgacaagaaatcaaagacatctcaaatgaaatcatcgggcattgtgatgaggagtctgtcatggcttacatggaaggattggtagagtaatggcggatattaaattattagccttggatttagacggtacactttttaacagtcaaaaggttgtttcaccagaaaataaaaaagctttgcgagcagcacgtgataagggaattaaagttgttattacgactggacgtcctctaaaggcgattagcggtttgcttgaagagctagatttgatttctgatgaggactatatcatcactttcaatggtggtttggttcaaaagacaaatggcgatattttagataaaagtgagctaacacgtgcgcagctcaagcgtttacacagcacgcttgaaccgcttgctcttccatttgatgtgcttagtgacggaattgtttatagtcttgccagtcaaggcaatcagtccctttacccacaagccaaccccaaacttaaatttgtagaactaacttcttttgatgatattcctgaaaatattatttataacaaagtcgttagcgtgacaaatcccgaatttttggacaagcagattttgcaatttccgaaagaattatacaatgagtttgaaattttcaaatcacgtgatattatattggaaatgatgcctaaaggcgtccataaagcagcagggttaaatcagttgattcagcatttgaacttactccctgaaaatgttatggctatgggagatgaagaaaacgacctctcaatgcttaaatgggctggtttaggtgtcgcaatggcaaatggtgttgctattgcgaaagaaacagctaatgcggtaacaacacgtaccaatgacgaatcaggtgttgcagaagctgttgaaaaatacattttaaatgcgtagtagaaaggaaaagtggataaggtaatcttatcgattttggtacttagtatgggattatttgaccgtttatttggaaataagaaaaaagaagttgaggagacggttgacagccaaagccaagaagaaacacttcaagaggttgtcgaaacatcagaacaaaccgaagcctcttctgatacagtaaaagaaactgttgaggtttcagaacaagcagaaatcgtcaacgatactgtggaagaaactccagaagttcaagacgttgttaatgtcaatggcgaagctgaatttgttgaaacagaaacgcttgttcagtctgaaaatagcgaaactgtggttgaaaatacagctaaccaaactgaagaaatttcagaagcaaccgcagtaactaatgaggctgaaacagaccaacatttttcagatgtcatggctgattattatgcgaaaaaagcagctgctcaagaggctattgaccgtggtgagacagttacttttgaagctgtcgaaacacgtcaagaaactgaaccaaaagaagtagttgtgcaagaagcaaccgaaaccgaagaagaaaaatacaatcgcagtctgaaaaagacccgtactggtttcagtgcacgtttgaacgccttcttggctaatttccgtcgtgttgatgaagaattcttcgaagaactagaagaaatgcttattctttcagacgttggggtgaatgtcgcaacacaattaacagaagatttgcgttatgaagccaaacttgaaaatgctaagagagctgatgatttaaaacgtgttatcattgaaaaattagttgatatttacgaaaaagacggtgttttcaacgaaaaaattaatttccaagatgatttaaccgttatgctttttgttggggttaatggtgtcggaaaaacgacgtcaatcggtaaattagcctacaaatataaaaacgaaggcaagaaagttatgcttgttgctgctgatacattccgcgctggtgcggttgcgcagcttgttgaatggggacgtcgtgtcggtgtaccagttgtaacaggaccagaaaaagctgacccagcttctgttgtttttgacggtatggaaaaagctgtcgctgaaaatgttgatattcttctcattgatacagcaggacgtctgcaaaataaagataatttgatggcagagcttgaaaaaattggtcgtatcattaagcgtgtcgtgccagatgcaccgcatgaaacactccttgcgcttgatgcttcaacaggtcaaaatgcgcttagccaagctaaagaattctcaaaaattacaccgttaactgggcttatcctaactaaaattgacggaacggctaaaggtggtgttgttcttgccattcgtcaagaacttgatattcctgtcaaatttattggatttggtgaaaaaattgatgacatcggtgaatttgattctgaagactttatgcgtggtctcctagaagggattgtttaaaagctaatgttagaatttgtcaaagcacatttatcaacaattctcttaacgtcatctacccttgttttaacagccatttatgcctttgaggcaaactgggttatcatgcttatttgggcattcgtgtcactcataaacattggacgactagtttatgcttataaacatactagctaactatttcatagtcaagaatagaaatctgagctttgcctcagatttctttatttttttcacaatcaatattgtcaaggtaagcttccaactcatgttttaatcggtcatgttcttgaatggtttgttgtaatttttcatcagaaacttgaatggctttttgtaacaactttttacggtcgctagatttaattgggtcatattggtatttttcaaaaaattggcgaatttctttgagagacatttgactttgtctaagaaattttatggcgtacaaccaatgaatagaagcttcatcaaaaatacggttgttattctcatcacgttgtaaacttgggattaagtcaaggtcacagtagtggcgaatagtgtgtaaggttagcccagttcgtttgctagtttctttaattgtatatgacataatgaaatcctctaaaaaataatagtaaatagttgacttcgggttacccgagggatctataatcatggtatcaaaaaaagactacaaaagtaaaggagaaacttttatggcaacattagttcgtgttcacggtcaagggattgaccagttacagttggatgaggttgaacttcgtgaattagcctcaaatgaagtgagaatgactgtcaaagcgagtcgaattactggcgaccagctaaactacatcaagggattgcgtttgccaggagaagctattcatgaaattagctctcttgggtatgaggctgctgggattgtgactgctattggaaaagcggttgatgaaaaatggcttggtaagcgagttatgcctgttggaccatatgattttgaacgttatccaagtttgggagatgatattattgttccagccagtcgtctggttgagattccagataatgtagattttacagcagctgctagtacttgggtaccatatctaacagcttaccctgtttatagtcagagtaatctaaaatcgggtgattatgtgttgattatcgcagggacttctgctgttggtcaagcggcgattgatttggcacgtgaattaggagcaattccaattgtgacaacccgctcacgccgtaaagcagcgcaactacgtcatttgaaacaagtcgagcatattgtcatcagctcagaagaagatttaaaagtagctgttggaacgattacaggaggaaaaggtgttcaattcatttttgatcctattggtggtaatacattgcctgatttgcttcaggtggctagcgtaggagcaaaaatttatgaatatggcattcttggtggcagtgagtgccaattttcggcaggacttttgcttggtaaaggcttaacgcttaaggggtggacagtaagtgaacttgttgaggatgacttggcaagaagccaagcggtgactcacatttgtgaaaaattagcacttggtgattttaatcctactattgctaaaacttaccctttaaatcagatttgggaagcttatcgtaaacttgaagagaatgactttttaggaacgattattattgaaccatgacatagtagcataagattctaatcatcaagcaaaaacccccttccagttttggaggggggcttgtgtttaaaagacacgataaacgtaaggattatcgggttcactagtctctttcatttctgtaatatgaagaactgggagtgtttgttcaagggtttggttgtattcgaggctgattgtgcctgttgcggtaatccaagtgttatcggcgtagcttgtactgtttccagttgtcaataagccataaacaccagaatccgcaatacagtgaatgataccaaaacggaaaaggaattgatagccttcgtgaccaggctcgttataaacaaatccagtataagtaatctcacgtcccataaattcatcaggatagagatagatgagttccatgacttccatataattttcggttgtgattttaagttcgcctgaacctttgtattttttgagttctttctgcatttctttttcgtaagcagaagatgtaaaatataaacttgtgtcaggtttcaagtattggactgttgttccgtcatcactaaccgtaccagcagaaccagcagcaagtgggaaattatagcctttggcagccactgtcgttgaatctagcgttaccgtaggaactaagagccctaccaaaactggaatgaccaaaatcatcggactagtcagcttcgctatttttccatgtaaatggctgtgcaatttcaggtttttcatccaaataaccagttgaataaccgctaaaaggaatgataaaaccatggaaatgtaggctaaataagcatagtgagtattgatgtattgatccaatttcccagagatttgaagatacatggttaattcaaagtaacccgctaaaattaaaaatcgaatcatcaaatcacccccacaagtaaacagtaaataataatcatcccaacagatactgtgataaattgaacgataaagcggggtttaaaggaatttaccatcatcattaggtttttaatatctaccattggtccaatcaagagaaaggctagaacaggtgctgtaccaaaacttgatagcaaggaagctccgataaaggcatctgcttcactacaaagggaaagaatgaatgccagtaacatcatgactaaaatagctgtaagggcattaccaccaattctagtcaaaatgcgtgttggcaggtaaatttgcattcctgaagctaccagggtaccaaaaaccaaataacgtccagtatcgaaaaattcatcaattgcgtgcgcaagagctaagaaaattttgcgataccatgtttcaccagaataatcatgaaaatgtgttggtttagcattttctttgaggatattttcatcaaccacaaatcccagcatgatacccaacgtaatagcaacaataatagcaccaagcagtcgtaaacctaagaagcgccagctatttccaaaggctgaataggtggcaaaaaggacgattgggttgataatcggagctgttgccaagaaaggaacagcggtgtaactaggaacttttttctctaaaaagcgcgtgataatgggaacaataccacattcgcaggacggaaagacaaaaccgataaaagttccaaaaaggattcgtaaaaaacgatttcgaggtagaaaacgttgtaccaaatcaggcgtaacataaacctcaatgaagccagaaagaatagttcctagcaaaacaaaaggcagtgcctcgataatgattgaaataaaaatcgcaaaccattgtaagacactagcaggtaaattattaaaaatttccataaaaattaatcagtcgctttctcagcttttttgtccttaactttcttttctttttcagggtcgctagagattttaggaatacttgcaaagcttgcaaacattgactctaaatcatcttgacgtttatgtgtgatagccataaggcacctcttttctatatgtaatcacctcttattatactatcaatcatcaaatagtacaaaaactaagcagacaagttagctattttaatgcgaaatagtgtgtcatttagacatttatctgtctaagaaatcggcgtgaatttctcattattgcatttaaaaatctaagtgaaaacctgagattcagctgatttatgatataatagaagcactatggaaaatgaaaatgtaacaaaaattgctcaagatttaaacatcaaagagagccaaattgccaaagttctagacttgacttcacaagggaataccattcctttcattgctcgttaccgtaaggaaatgacaggtaatttggatgaagtacaaattaaagctatcattgacttggataaaagcatgacagctttagctgaccgtaaagcgactgttcttgctaaaattgaagaacaaggtaagcttactgcggaactcaaaaaagctattgagaacgctgaaaagttggcagacgttgaggaactttatcttccttacaaggaaaaacgtcgtactaaagccactatcgccagagaagcagggctatttccactagctcgtttaattttgcaaaataagccttcgcttgaagtagaagcagcgaattttataacagaaaggtttgaaacagctgacaaggcacttgctggcgcttgtgaaattcttattgaagctttttcagaggacaacaagctccgctcatgggtttacaatgaaatctggtcttacagctcaatcatatcaacagttaaagacgaagctgctgatgataataaaaccttccaaatttactatgatttttcagagaaagtttccaaaatccaaggttatcgtattttggcacttaatcgtggtgaaaaactcggtattttaaaagttggtttcgagcataacattgataaaatggtgcgcttcatgggagctcgttttaaaaataaaaatgcttatattgatgatgtcatagcaggaacgattaagaaaaaaatcgttcctgctatggaacgccgtgttcacagtgagttaacagaaagtgcagaggatggtgcaatcgaactgttctccgaaaatcttcgcaatctccttttggtgtctcctttgaaaggaaaaatggtgttaggatttgacccagcctttcgtacaggagctaagttagctgttgttgaccaaacaggaaaattgatgactacccaagttatctatcctgttccaccagctagtcaggctaaaatcgagcaatcgaaaaaagatttagcagagctcattcgcacatatggtgttgagattattgctatcggaaatgggactgctagccgtgaaagtgaagcctttgtggcacaagttttgaaagattttccagatgtttcttacgtgattgtcaatgaaagcggagcttctgtctattccgcatctgaattggcacgtcacgagtttccagatttgaccgttgaaaaacgctcagctatttccattgcgcgtcgtttgcaagacccacttgcagaattggttaaaatcgatccaaaatcaattggtgtcggacaatatcagcacgacgttagtcagaaaaaacttgccgaaaaccttgattttgttgtagataccgttgttaaccaagtcggtgttaatatcaatacagcaagtcctgcgctattagcccacgtttcaggattaaataaaacaatttctgaaaatattgtcaaataccgtgatgaaaatggacgaattgcttcgcgtgaagaaatcaaaaaagttccacgtctgggagctaaggcttttgaacaagcagcaggtttcttgcgtattccaggggcagaaaatatccttgacaatacaggcgttcacccagagtcttataaagccgttgaacgtttattgaaagaattaaatattacagatttagatgattcagcaaaaacaaaactgcaatctgtttcaattgaaacgatggctgaaaccattaatatcgggcaagaaacgcttaaagatattatcgctgacctcttaaaaccagggcgtgatttgcgtgatgattttgaagcacctgtgctccgccaagatgttttggatatttcagaccttgaaattgggcaaaaattagaaggaactgtccgcaatgtcgttgattttggtgcatttgttgatattggtttgcatgatgacggtttgattcatatttcacaaatgagcaagtcctttgtcaaacacccaagtcaagtggtttctgtcggagacgttgtgacggtttgggtttcaaaaatcgataaggaacgcggaaaaatcaatctttccttggtagacttacgtgaacttaactaattttatcaaaacagtctcacgagaagatttcggaaaagaatttcgccacacggcagtttggaatccacgtttgcggacaacaggtggtcgttttttcccagctgatgggcatttggattttaatcccaagatttatgaagcatttggtgttgacgtttttcgaaaaattgttcgccatgagctttgccattatcatttgtattttgagggaaaaggctataagcacgctgatgccgattttaaagcattattgaaagcagttgatggtctgcgttacgcgccagccatgccccaaaagacgaaaaaatacctataccgttgccaaaaatgtggacaagactatcaccgaaaacgtcgtgtcaatacccaaaaataccgttgtggacgttgccacggcaagctcttagaaatcaaaaatcaagaaatttagagaaagattttttcttcagtataaaatcagtcgtaggactgattttattttaagggcgattaggtataataatcatagtgagataaaaagaaggaagggactaaaatgaaatcagctctttataaacagcgaaaaaataaactggtttgtggtgtctgtgccggaattgctgataagtttggttgggacttgcctttgacgcgtgtcctgacagcattgctgatgtatttttatggctttggcattgtcatttatattcttttagcaatttttcttccttacaaagaagatatcactcgcgaccattatggaacgggaccacgccgacgtaaggatgctgaagtcgttgacgaagatgacgacaacgacggttggttttggtaaaaactgacagttcaacttcaatgtagcaaaaatttgacacttatagggataacaggaacttataaaggtctttcaaaacaggaaaagctcagagcatgattgttctgggcttttgatttggtagctttttattagcaggaaactgacaatatttttgaataagtctgcgtgagcgcttacttttgcaggttaatgtgatataataatgaaaaaaagaggaaaaggattgaacaaaaattgatgataaactgaaaatagcttgtggtttagtcaagcttattttctaaaattttcaatttatttacacagtcacgaggtgattggtaaatggttcatggtacatcaaatgtcggttactgtaaaaatgttggtggacaaggttaagctagatgttatctacggtgatgatgacttattagctaaagaaattacaacgtcagatatttcacgacctgggcttgagatgacaggttattttgattattattcgccggaacgcctgcaattgctagggatgaaagaatggtcttatcttaccaaaatgtcatcacataatcgtcatcaagttttgacagaaatgattaagccagagacacctgctattattgtggcgcgtaatctagccattccagatgaaatgttggcagccgctaaagaaaaaggcattgctgtcttgcaaagtcatgtcccaacaagtcgtttatctggtgaaatgtcatggtatctggattcttgccttgccgaacgcactagcgttcatggtgttctcatggatatttacggtatgggagttttaattcaaggtgattcaggaattggtaaaagtgaaactggtcttgaattagtcaaacgtggtcatcgcttggtggctgatgaccgtgtcgatgtatttgccaaagacgaagaaacactttggggggaacccgcagaaattctccgtcatttgcttgaaattcgaggtgttggtatcattgacgtgatgagcttgtacggtgctagcgctgttaaagattcatcacaagttcaattggcaatttacttagagaattttgaatcagataaaatctttgaccgcttaggaaatagtaacgaagaaatcgagctatctggtgtaaaaattccgcgcgtgcgtatcccagtaaaaacaggacgtaacgtgtcagtcgttattgaagcagcagccatgaactaccgtgctaaacaaatgggatttgatgcaactaaaacatttgaggaccgcctcactcagcttattagccaaaacgaggaggactaatgattgatccagttgctatccagttaggtcctattagtattcgttggtatgcgatttttattgtttcaggattacttcttgctgtttatttagcgatgaaagaagcaccgcgtcggaagataattcctgatgatattttagattttattttaattgcattcccacttgcgattattggtgctcgtgtttattatgtcatttttgattggtcttattatgctaatcagccattgagcgaaatagttgccatttggaacggtggccttgctatttacggtggcttgattacaggagcaatcgtattgtttgttttttcttattaccgagcaatcaatccactcgattttttggacattgcagcacctggtgtcatgattgcgcaagctattggacgatggggaaatttcataaatcaagaagcttatggtaaaatagtagataatctgaattacctaccagattttatcaagaaccagatgtatattgatggttcgtatcgtgttccgacatttttatatgaatcattgtggaatttattaggatttgtgattgtcatgagcctaagacaccgaccacgtttcttcaaacaaggtgaaattgccttcttttacctcatttggtatggttgtgggcgttttgtcatcgaaggaatgcggacagatagtctaatgttactcggaattcgagtatcacaatggctttctgctctaatcgttttgattggtgtggtcttggttatctggagaagaaaacagaaagatgttccgtattatcaggaataaaaataggtagatgggagaaaaaatgtttgaagtagcactattaattattgccattgcttttgctgttttggttggcgtttttataccacttggtgttaaactatataaaacagttgatgttgtaaatgagacaattgatgaaacaaagcaaaccataaaagtgttgaccagtgatgttaacgtcactcttcatcagaccaatgaaatcttggctaaagctaatgttttagttgaggatgttaatggcaaggtgtcaacaattgatccactttttgtggcagttgcagagttgtctgagactgtttcggacttgaatacacaagctcgtaacatcactcaaaaagctactcaagcctcatcaaatgttagcaaagctggtgcagcatttgctgttggtaaagttgcctcaaaattatttcgtaaaaaaggagaagaagcatgagtaaactattgaaaaacgtgattattggtgttgcctctggtgcagccgcagcttatttcctatctactgaaaaaggtaagaaattccaaaagaaagccgctaaagcttacgaggcttataaagaaaatcctgctgaatatcatcaaaaagcaaaagataaagcaacagaatacacagatttagctgttgataccttcaacgactaccgccaaaaatttgaatctggtgaattaacaaccgatgaatttttggatacagtaaaagaaaaaggtaaagccgcagccgattttgcttctgaaaaagtctcagaattcacttctaaagtatctgaagcggttgacgaagcagaagaagctaaagaagaaacaaaagcagaagtcgatgacattatcattgactacacacaagacgaagaagccccagcaactgaaaagcctgagactactaccgaagaagctgatgaagaataataaaaaggtccagtggacctttttatgttcgagcctgaaaacaggaaagcgagaaggtgccagtggacctttttatgttcgatcccgaaaataggaaagttaagaaaaatatcaaaaatttttcttacaatataaaaaagcggtcagttgaacacatgaccgcttttctaatatggaaaatataaaaacaactccaaagtggagttgtagtagttcatttcaatgtcttaaagaccaaataatacttgaaacagctgacgtaatagctaggctaataagagaggcaaataagaaagcccagattggagctagattcaagaccagcaaaaagaatgaaatgacgacagtcgaaattccaaataatgcaatacgagcaaaaaacattaactcttttaatttagcatttctgtggtcaatttcttgaaattcttgaaattttggtgcattatcttcttgataatgccgttcttcaagctctttgtgttgctttaatggtgttggcataatcctctctcctctgatacttagatatcataccataaattaacaaatttgtcacctttttttaaaaaatcccttgactgatgttaaaaaatatgtttaaaatagttgttcctcttttttgtttcaaaatgaggatttctttttgagcctctcctctcataaagtttttctcattttgagatgtcactaaaactttttagaaagctataacaataagattttagaggatatctgtgactaattgttataggagtggtataattaaaacgttatggaaaaaataattattactgcgacagctgaatctattgagcaggtcaaagagcttttagatgcaggtgttgatcgtatttatgtgggtgaggaaaactatggtttacgtttgcctcataattttacttatgatgaactttctgaaatcgctaagctagttcatgatgctggaaaagaactaagtatcgcttgcaatgctttgttgcaccaagatatgattaatgcggttcgcccatatcttgattttttgaaagatattaaagccgattatctagtagcaggagatgcaggtgtttttcacatcaataaaaatgaaggctacgatttcaagatgatttatgatgtttctgtttttgtaacatcaagtcgtcaagtgaatttctggggagaccatggcgctagtgaagtcgttcttgcccgtgaaattccgtcggtcgaattgttcaaaatgtcagaaaatcttcgctacccagctgaagtgcttgtttacggagctactgtcattcatcattcaaaacgtccattattgcaaaattattacaattttacgcataatgatgatgaaaaaacacgtgaacgtggtcttttccttgctgaaccaagcaataaagactctcattactcaatttttgaggataaacatggcacacatatttttgatactgatgatcttgatatgatgccaaaattgacagagttaactgaccataatttcacgcattggaaattggacggtatttattgtccagggcatgattttgttgagattgttaaatgctttgtcaaagctaaagaattgattgaagcagatgaatttacacaagaccaagctttcttattggatgaagaaattcgtaaattacatccaaaaggtcgcacacttggaactggattctatgaatttgacccagaggaagtgaagtaaaactacccaaaaatgaactcttgtcatgattgagttactatttcagggcatgacaagttagctaattaactgaaattgttgtaaagatatttatctttaaattttactatcttggaaataggaatataataatgtcagaaaaaactttaaaacgtccagaggttttagcacctgctggtactcttgagaaattaaaagtcgctgttgattatggagctgatgcagtctttgtcggtggacaagcttacggtcttcgtagccgtgctggtaacttcacgatggaagaattacaagaagggattaattatgcccatgcgcatggcgctaaggtccatgtcgcagcaaatatggttacccacgaaggaaacgaaactggtgcaggagagtggttccgtgaacttcgtgatatgggcttggatgccgttatcgtatctgacccagcacttatggtaatttgtttaacagaagcaccaggtttagaagtccatgtgtcaacacaagcttcgacaaccaactacgaagcctttgctttctgggaagaaatcggtgtgtctcgtgtcgttttggcgcgtgaagtcggcattgctgaaattgaagaaattcgcaaacacacctcacttgaaattgaagccttcgttcacggcgcaatgtgtattggttattcaggacgttgtgtcctttctaatcacatgagccatcgtgatgctaaccgtggcggttgctcacaatcttgccgctggaaatatgacctttacgatatgccattcggtcaagaacgtaaaagtcttgaaggtgaaatcccagagcccttttcaatgtcatcagttgatatgtgtatgattgaacacttgcctgatttgattgaaaatggtgttgatagctttaagattgaaggtcgtatgaaatcaattcattacgtatcaacagtcacaaactgctaccgtgcagctgtcgatgcttatctagaaagcccagcaaaattcgaagctatcaaaggtgaattacttgatgagctttggaaagttgcccaacgtgaattggcaactggcttctactaccaaacaccaacagaaaacgagcaactctttggtgctcgtcgtaaaataccacaatataaatttgtcggtgaagttgttgcctttgacgaagaaacgatgacagcaacaatccgtcaacgtaacgttattctcgaaggagatgccatcgaattctacggaccaggattccgtcattttgaaacttacatcaaagatttgcatgatgctgatggcaataaaattgatcgtgctccaaatccaatggaattattgacaatcactgtccctcaagcggttcaagcaggagatatgattcgtgctcgtaaagaaggacttgtgaacctttataaaagcgacggttctagcaaaactgttagagcataatcagtaataattattaaaaaatgaacgactcttaaacataatggcatagggtcgttcattttttgtctagttcttgagatttacggacagttggtggtaccaatgtcaaacgattgatatcgctgatagcgatgattgttgagatattcttttggaagtttttgaggattaatttgtcatttttggggtcgtatttaaccaaatcacctgtaaaactgccgtctttgtaaatagcatgaagcgctaattgcttttcttgtgcttctttgatggttgtgatgattttgtgagttttcagattaatatctgcggctggttgagcacgaaagtcaatatacgcctgtgcttgcctttttaaacatttgataagatttttcatagtcatttacctaaaaaattgataaaatgattatacaccttttgaagaaaaaaataaataatcaaaagtttagaaagtttttttacgaatatatatattaggaggaagatttattatgtcagaatttaaatttgaaattgttgaacacttacttaccctatctgagagcgataaaggttggacaaaagaattgaaccgtgttagttttaacggagcagagccaaaatttgatattcgttcatggagcccagaccacagcaaaatgggcaaaggtgtgacactcacaaatgatgaatttaaaattatcttggacgctttccgcggctaagttagagataaaagaggctgagacaaaagtactcagcttctttatttatatagttattatttacaaggcgcagtggttgagtggattctaatgcgctgataaatcagcttttacaacccttttgacatcaagctgcgcttgacttcatttccaacctcaaaaggttccccaaacctttttgatgtcaagcttcacttgactctatttcccacctcgaaagattccccaaatctttcgagccatgcgggggtgggagtaaaacagttcactgaactgttttaggtcagcaacaagaaattaagacttgctgagaaatcaagtttctacgaaactaccgattcgctttttaatttttaggctcatgaataaagtctccactggagactttatttgtctcactcccttttttatgcaaaataggcagtatttttcagagagataaataaaggtttactgatagctgtaatagctagaagttttccaatttcaggaatgataaaaggtacaacgccagctaagaaatcagcttgccagctcatatttgctaaaaaatgtaagccaatcactccgcaaataaaagctaaacaattaccgagtagattgctaacaaaaatcttaaccaaagagctttccgtattggttaggtaagaagttaaggcagcgtagaaaagaaagccccagagaaaaccagatgttggacctgataatgctgcaatacctccgctaccacctgcgaaaacaggaagcccaatagcgccaagtagcagataaagcgccacactgagcgtggcttcacgtggacggaaaatcgaagcgataagtccaacagcaagtgtttgaagtgtaaacggaaccgttccgataggaattacaatctgtgaaagtattgcaatcaaagcagcaccaaatgctgggaggatgagcgttaaaagcttatttctagacataaaatctccttagttattttagttaacttataattatatttaggttaactaaattttatccaaagctaagcagaatgtcaagaaaaaaatcgctttttcagcgatttcattttcctttatggttgagatagtctgctaccccaatcactccaaaaacaattcccagaatgataaagattgctttatgctctaacaagccataagctaaaaagatgatagcagaaatgaaatagacaatattttttgacatagcaattccttttgaatataatacttacccacattgtagcataaagtagctttctttgacattctaaggctagtcaaatcacatatttttctttataatgaaatttggaaacgtaatcataatcattaaaaaggcgaggaaaaatggcagatttacaatataagaattacatttttgacttttatggaacacttgtagatatttggacagacgaagatgacgagaagctttggaagcggatggctgcgctttatgctgcttatggcgctgattattctgctgcggagcttaaagcaaattatgataaccatattaaacgtcaagaaaatcaattacgcaaacgttctcagttagaacatattgaggttgatttggtggttgtttttattgaattgctgttagaagcaccgcacacacacgccacagatagcattattctagatcttgaaacatggggaaatctaattgcccaaacttttagaatgttgtcacgcaagaaattgcaagcttacgaaaataccttagcgactttgaaaacactcaaagaagtaggagcaacagttattttattgtcaaatgcccagcgagccttcacccaagctgaaattgaaatgacaggctgcagagaatttcttgataagatttacatctcgtctgattacaaaatgaaaaaaccacaagtcgaattcatgaatctggtcttgaacgacaatcaacttaatccagaagaaaccgttatggttggcaatgattttacgagcgacatggcaatcgcacaagtagcaggcatcgacggtatcctgcttaacacatttccatacaaccaatcagaaattgaaaccctcaacaccatgaacgccaaagtaattgaggatatcagtgagttggtggtggagtgaaaaatcatatctaacgttatgttagggacattttaggtatttaatcagagacggtaacagctgtatgattgatatattcataaataggtgttctgataagcctcagaaattctcctttaaattgcttaggtggagaaggattatcttgagtaatccaatttttaataacaactacagtgagtgatgtaacgagttgaaccacttcttcatttgagagattgaattgtccttctttagggacaatatttgaagcaccccatttagtgtaagtagatacaataaaatcttcaaaattaggatcgatatttgtagtatagagacaccttatccactgtctctccttccaaattgctggtaaaacattttcagctatgtaatctaaagggttgatattactggaggggttataattattaaatacttggcaaatctctttatcgatgagattatggacatacaatataatttcattgaaatttttaaaatgtttttgataaatggcctgtcttgaaatgccagcttttgaagcaatctcggaaattgtaaaatttgatttctctggattttctgaagccaatgcaaagaaagcatcgatgattttttcacgcgtatattttgccatagtgtgaacccccagtaaatttataggtattttaacacaagcagaagaatttatctaatttgcttagagagtgaatattttctcattttatttgttgaaaaccttataaaatagggaattctagtcgattaatattttaagttttaaaatattaattgacataatgtaaataaataatgaaaattttttagaaataagataatagagttaggaagtaaaactttattttttaaaataaggaaaaggacaaataaaaagttttaaaactgcttttagatgagttgttattttataataatgatattggaaaaaacggtaggcagtagttttaagtaatggcttaacttcagtcgcaagttattattgcaagagtattttaaataataactgacagtagaatttctgctgtcagttttcttttattttaaactaaaaaatatcccttgaattattcaagggaaggttttaaatgattatataatctaatttacttcatcgttgggaacaacaagacgtcgcggattgttgttgtgtctgtgaggagcatgactaggcggtcgataccgataccaagtccacctgttggtggcataccgtattcaagggcttcgacgtagtcgtagtcaattccagttgcttcgtcgtcaccaagttctttagcttttgcttgggcttcaaaacgtgacaattgatcgattggatcgttaagttcggtaaaggcattaccgtattctttagtcatgatgaagagttcgaagcggtcagtgaagcgaggatcttctgcgtttttcttagcaagaggagaaacttcaactgggtgtccataaacaaatgttggttgaatcaatgtttcttcgacaaattcttcaaagaaagcgttgatgatgtgaccaactgaagtgaagtgtttttcaactggtacatttttctctttggcaatagcttgcgcttcttcgagagtcatttctttccaaaaatcaacgccagtaacttctttaatggcatcaaccatgtgaacacgtttaaatggtttgtcaatggcaatttcagttccttggtatgaaataggaccgtcacctttaacagcttttgaagcgtgttggataatgccttctgtcaaatccatgatatctttgaagtcggcataggcttgataaacttcgatagatgtgaattcaggattgtgtgtggcatccataccttcgttacggaagatacgtccaatttcgtacactctttccataccaccaacgataagacgtttcaagtgaagttcagttgcgatacgaagaaccatgtccatatcttgtgcattgtggtgagtgataaatgggcgagcagcagcaccaccagcttcgttgtgaaggactggtgtttcaacttctaagaaaccaagtccgtcaaggtaacgacggatttctgagatgatttttgaacgagtcacaaagcgttcaaagctttcacggtttgaaatcaagtcaaggtaacgtttacgatattttgtttcaacgtctgtaagtccgtggaatttttctgggagtggacgaagcgctttagacaagtgagtaaggtgagtagctttgattgtcaattcacccatgtctgtacgcatgatttcaccttcgataccgaggaagtcaccgaggtctgcttttttgaaaatttgatagttttcatcaccgacagcatctttgcggacatagatttggatttgaccgtcgcggtcttgaatgtgcgcaaaaccaactttacctttaccacgcttagtcatcaagcgaccagcgatagtagctgtcttgttaatttcatgcaattcttctttagttttgtcagcgtatttttcttttaattgaccagaagtagctgtgcgttcaaatcgagttccgaaaggatcgatgccttgttcagccaaagctgccattttttcacgacgcacgatttgttggtcgtttaattcttcaatgtgttcgtttgacatgttttcctccaataagtattctttcctattgtatcataaaagaggctagaatacaccttatttttgcgtgctttgcttgggagtgagacaaaaattggtaatttcaaaagaaattcgattttttagcaagttttttcttgttgctgacttgaaacggggctattttcagattgtcaaagtccaaaacaccatgttttgtaaatataacgacacaaacaaagagattaatcacttttgtatcagctttgttttcttgtctttgattgaaaagaaggctaaaaaatagtataatatgtgacggtaaaaattattagagagaaaagagattcatgattacttcaattgtttttgatgttgatgatacgatttatgaccaacaggcaccttatcgcattgccgttgagaaatgtttccctgattttgatatgagtaaaatcaatcaggcttatattcgtttccgtcattattcagatgttggatttccgcgtgtaatggcaggtgagtggacaactgagtatttccgtttttggcgttgcaaggaaaccttgttagaatttgcttaccgtgaaatcgatgaagcaactggcgtgcattttcaagaaatctatgaagaagaattggaaaatatcacaatgcttgatgagatgcgcatgacgcttgattttcttaaagaaaaaggcgttccaatgggaattatcacgaatggaccaacggaacaccaattgaaaaaagttaaaaaacttggtctttatgattatgttgatccaaaacgtgtccttgtcagccaagcgactggattccaaaaaccagaaaaagagattttcaaccttgctgctgagcaatttgacatgaaccctgcaacaacactttacgttggtgattcatatgacaatgacgttgtcggtgctttcaatggtggctggcactcaatgtggtttaaccaccgtggtcgtagcttgaaacctggtatcaaaccagtttatgatgttgctattgataactttgaacaattgttcggagctgtgaaagttctttttgaccttcctgataataaattcatctttgatgtcaatgacaagaaaaatccaattcttgaaatgggtatcaataacggattgatgatggcagcagaacgtctgcttgaaagtaacatgagtattgataaagttgttatcctgcttcgtttggacaaacaacaagaaaaagttttgcgcctaaaatacgcaagaaataactaataaatgaaccctcctaaacgctatttaggaggtttttttgtctttaagatttcttttgtttataagatgtgtcattccattttaggcaagtgaaggttttaaaatccttggtctctaaaatcgtcacactaccgttatcaagtccgcctttggcacggagaacggctggttcatatcctaataaagtacggatagaggcggtaaaattagcaccatgcccaactaacaagacattctgataaggttgatttttcattgatttaatgaatgactcaacgcgtttagtggtttgataaacagattcagcgtcaaatacatcattatcgaatttagctaaattatgtcgaaaagcttgcatttgttgaggataaatagatgttatcgttgcaattttgctgccttccaatcttccaagatgccattcacgcagcgagggttgaaagctgattggctttggatagtggctgcgtgacatgataatcttgcaagtatcgctggcacgttttaaatcgcttgaaaaaacggcatcaaatttaacatcttggagataatcacctaatttttccaaatcatggacggattcctccaagagtggggagtcaccatttgctccttggaaacgtccttctaagttccattgtgttttaccatgacgtacaaaataaaatttcatcagttactttccaatctaaaaattaatgtgaatcgtcaatcaagtcagcaaagctggcaccaacaaaatctgccaaggtttgactgtcaatgcggatagaacgtccaatctcaccagcagaaacaatcatcgttcccatttctaaagcacggttatcaatgaaaatcggaaaattgtgtttctgatgaataccgacaggattatttgctccgtgaatgtagccagtcgttttttgaagatttttttgtggaatcatgctgacttttttgttgccagaaactttggctaattttttctcagaaagatgttcggtgatttgaacaattccgattagaggacctgttttgtcacctgttaaagcaagggttttgaaaatatcagatttttcaatgtcatctggtaagtctccctcaagtgcattgattgctaaactgtcgtgttcgatttttgccttgttcagaatttggtcaacaagtgtcttttttaattttgctttttttgccattttccctctcaatctttctatttattagtcaattactattttactaaaaaaataaaaaggtacaagtttgcaccttttagagagcattataataagcttggacgagttcgacaaaatcttcgacgtcatagtccgtaccgaaataatcattagcggtttctgtccagtaatcagttggatcaacgtggtcagtaccaccaaggtaaaggctgaccatttcatgtgtccaaatggttccttcgccatcttcttgaccaagtgttacaggaaggtcatattttttgagcatgtaggcagtataataagctgcgtttgctagttgctcggcgaagcctttttgagaatcctcatgtgttaattcaaattgaatgtaataaggattggcattggcaccagcaccctgagctttgtaatcttcatcagcaatgcgaagaatggtatcactatcaatgaaagagtggacaaagacaccttcttcatcataactttgaaccatataattcacttcgctttcaatcgttgaattgtcaacgccagtatcatgaataattaccccaagaggttttccgtcatctgtcttataagcggcttgttcaaaactactttcaatgtcatcagtaatatcagtgtgcgaataaccaagtgtttcagcgatataagcattaatagtattatcctgctcaagtgaaatatcattcgtgtcgatatagtaagtatcaccgttcatgctaaattgagctaaggtgatatcttcgtcatcgagcgtcgcatcatagtaataggcactaattgtaatcgcagtattttcactaattttgctgctagaaccatcgttggtgtacataacagcgtcagaagtagagaccgtagctgtttcggaaacgtcataagaattggcatttgataaatccaaacttccgtctgaagctaaagttgtgactcctgaaaaaatcagtttagcgagaattaggacaagtgcgactgctgccgtgacaagcccagctattgttattatttgagatttttgttgtcgttttctacgtgaataatttcttgttggcatagttttactataagttttaacccttaaattaatattaatttgagggttaaaattgttgattttgacattaaaaatcacaggatttttcagaacttttttataaaaattgagttagcaaaaaagctaggatagtatttcctagcttttatttgctactacttgaacttgacgtgctactgcttgaggtacttgttgtaccgaaaagtttttcgtacgttgttttcgtatcttttgtgacggcaatttggtttaagtcaagtggtgaactaaaaccattgatgtaaccttgtgaggtgtattgatggaggtcatagtccaaatcagtttgtggcgcagcatcgtaataaccagtgtcagaaccataagcaggaatccacactgcatcgaaaccatccacggaaatttcttgttcatccatgaaataagttccaatgtagataccgacattttccgcaccgagttttttgagctcttttaagaaagcctgtacacctttattcatgtcagacatagtcgcctcttcaacatcaatccaatagaaagttggactgtaaggtgaagcattctcatagaaagtttttgcttcctccttcatctccttgacggttgtaccgagagcgtagctataaacggctacaggaacatttcgtttctgtaattctttgatatgtgtcttaaatgatttatcaataccagttgtataggcggcattgctatctttactgatttgtgaccctccataaacacgaacgatagcaccagaaatattctgagataaagtatcatagtcaatttcgcttggaagttgccaacctgagatatcaataatcggattaagaacaaaatcttcatcagtttcagaagttgatgtagtggtagtactcgtgctactcacagttggaatagaatccttagctgaagctagttgttgcttttgtaagctatctgagtgagctttaccaatcacgagaagtagcccacagagggcgaagaaaactacaacaacaatgggttttattcgtcttctcattagtcatattttagcgtaaaaaggcttaaaaatcaaagcaatgctcattttgtaatcattttgtcatattttttaatattttatctatggactgttacaaaagaagtaatgctagtaaaggcgctgcaaatagtctgacagctatttgtcattgataaggctttcaatttctgtaacaattgtttcaggttctgtttttgatgaaaaacgtttgatgacattgccattttggtcgataagaaattttgcaaagttccattcaatacgtttgccaagcggtcccttttcttcactttttagccaatcatagagtgggtcggcttctttaccgttgactttaattttcgcaaagcgaggaaaagttgtctggtaattcaaggtgcaaaaggtattgatttcgtcggcgtttcctggcgcttgatttaaaaattgattacaaggaaaatctaaaatttcaaatcctttgtcatggtaagtgtcataaagcttttgtagtccttcgtattgtggggttaagccacaacctgttgccgtattgacaatgagtaggattttgccttggtattttgacaattggacatcagagccgtcttgggctttgacagtaaagtcataaagattagtcatgattaagctcctttgtataagcaataatttggtcaacggtatcacttaaaaattgaatggtatcacggagtggttgcgcagtggaaatatcggcaccaattaatttagcggtgtcaagcggcgtacgtgaaccacctgattttaagaaattcaaccagtcgttagcaccatttgggttattttttagattaagatacccagcagttgaaataaccatacctgcagagtaagtgtagctatacaacccagcataataatgactttggcgcatccaagttaaagcagcatcgtcgtcaatatcaatggcatcaccccaaaattggctaagaacatctttcattatcttgttaagttgtgtagcaccgaaggtttttccgtcttcaatgagattgtaaacctgacgttgaaaagcagcttcaagtaagtgagtgataaaattatggaaataagtatctgtcaaacgatgagcgagggcaaagcgtttctgacgtggagtgtcaaattgtttttcgaggtaatcgctgagcagaagttcgttgaaagtagaaggggcttcgacgtaataagttgacatatgggtattaaagtaactttggttgttgtctgagaagataaattgtccagagtgaccaatttcatggataagtgtgtacacatcagacatacgaccagtccaactcattaaaacgtagggatgaactttgtaagggtcagtagcgtagccaccagaatctttattggcattagcagcaaagtcaacccaacgttcttcttgataacgtgagacttcttgagtatattcgtcaccaagtggggcaacggatttcatcaccaaatcataagcatcatcaatcgtaacctctggattaagctcgctatccaagtcaagcttccagtctgcaaaagtcatttttttaagaccattaacttgagcaacgtgtttgaggtatttttgcgcaacaggagcaaattctgtcataataaggtcaatttgacggtcaaacatgtcacggttaacttcttgttcggctaagaggtaatcaaaaacagagtcgtaacctcgcatgtcagcaatgattttttctgatttgacttgtgctagataagcacttgctgcggcattttgatgtttacgcagtcctgcagaaaaagaacgaaaggctttttcacggacttgagcattttcatgattttgataaaaattttcataggtgacaaaagagttttgatagaccttgccatcaacttcaaaatcttccatttcaaagtcacctgcacgcattttggtgtagatatcttctggcgctttaaaaacttcaccaaggttcgtcaacgctttttcaacttctggggagataaaatgacttttttgaattttcgcttggcgaatagctgcgctaaaatgcggattttcttctaaagcatcaaggatttctaagtcggcagtcgctagcgcagtatcaaagaagcttaatgctacattggctttcgtgaaaaaatcagcaccagcttgtgcaatctgagcaaattcttcattgctaaagtcgctggtttgcggcatgaaagaataattatcgatatggctcatctcgatataaatttgttcaatttcataaagcgctctggtaaagtcttccaaagtcgtcaaattctcctcgtaatttcgtttaaaaagattaatatcttctaacgttttttcgatacttcgcaaaaaatcctcacggtcttggtaaagggcactcaaatcccataattcattttcaggaaattccgaacgtttttttaattccatctagtattactcctttgaaaacttttgtcatggaccagtatatcagaaaataacacctaaacaaaaaagaaagtttcccattttctcaaaaagaatccttcaacattttttcaaaactaaaaacgctaacaacctatttgttaacatgctttgttagttttttagatattttgtctcaaaataaatatcgtttaaaatatcagaaaatttataaaataatggacaatttgacataaattgggttacttttgacgtaaaaagtggtatgatagagtagtacgcttgtaataaaggattaaaatccgaacaaaaaaggagtgaagagtgtgacaatcaaaaaactggagaacaatagcacccagtcgattattaccgaggaagtcaaagtattaaaagacttgctcgatgagacaactcatcaaatggttggtgatgaggtgtttgccaaaattcaaaacattgttgaattgtcagcaagtgatgaatacgtcaaacttgaaaaattagtagctcaattaaccaacgatgaaatggttgtagtgtctcgttatttttcaattttgccacttttaatcaacatttcagaagacgttgattttgcttatgaaatcaattaccaaaataataccaatcaagattatcttggtaaactctctttaaccgtagatatggtttcagaaagcgaaaactctaaagaaatccttgaaaatgtcaatgttgtgcctgtattaacagctcaccctacacaagttcaacgtaagacagtcctcgaattgacaaatcacattcatgaccttttacgtaaataccgcgatgtcagagcgggtgttgtgaaccgtgacaaatggtacactgatttgcgccgttacattgaaatcatcatgcaaacggacattattcgtgagaaaaaactgaaggtaaaaaatgaaattaccaacgttatggagtattacaatacatccttaattcaagcgattaccaagttgacttcagagtacaaacgcttagcagctgaaaaaggcatcgacctagaaaatccaaaacctatcacaatgggaatgtggattggtggtgaccgtgacggtaacccatacgtaacagctgaaacacttcgtttgtcagcaacggttcaaagtgaagtcatcattaactactacattgaaaaattaacaggtctttatcgcacattctcactttcaacaaccttgactaatattagtccagaagttgaaaaattagcagaattgtcaagtgataaatctatctaccgtgaaaatgaaccttatcgtaaggcatttaactatattcaatcaaaattaattcaaaccttaatcgaattaaaagctggtccagctatttctcaacgtgttttggaaagtagcaacaacatcagttcagatgtttacacaagcactaacaacgctagtgtcgttacaaaatacttacaaacaaaattctctaaagtttcatcagaacttcaagaagaaattccaagctataaaacagccaaagaatttaaagatgatttgcttatcatcaaacaatcattgcttgacaatggtgatgatgcgctcttgacaggtgattttagcgaattgcttcaagcagttgatgtctttggattctatcttgcaacgattgatatgcgtcaagattcaagcgttaacgaagcttgtgttgcagaattgttgaaatcagctaatatcgttgaggattacagcgcactttcagaagaagaaaaagtaaaagttcttctcaaagaattgcaagaagacccacgtacgttgtcatcaacaaatgctgaaaaatcagaacaacttcaaaaagaattagcaatcttccaaacagctcgttaccttaaagataaattaggtgacgaagtcatcaaacaacacatcatttcacatactgaaagtgtttctgatatgtttgagttagctatcatgcttaaagaagtcggacttcttgataaccaaaaagcgcgtgttcaaattgtgccactctttgaaacaatcgaggaccttgaaaattcacgtgctatcatggaagaatatcttgattatgatattgttcgtcgctgggtttcagctaacaaaggttaccaagaaatcatgcttggttactcagacagtaacaaagacggtggttacttatcatctgtttggacactttataaagctcaaaatgaattgactcgtattggttcagaacgtggtattaaagtgacattcattcacggtcgtggtggtactgttggtcgtggtggtggtccatcatacgaagctatcacatcacaaccattcggttcaatcaaagatcgtattcgtcttactgagcaaggtgaaatcattgaaaataaatacggcaataaagacgttgcttattacaaccttgaaatgttggtttcagcaactatcgatcgtatcgtgacacgtatgattacaaatccagatgaaattgatgatttccgtgcaacaatggacggcattgtcacttactcaaatggtgtttatcgtgatttagtatttggtaatccgcatttctacgattacttcttcgaagcaacaccaatcaaggaagtatcaagcttgaacattggttcacgtccagctgcgcgtaaaacaatcacagaaatttcaggtctccgtgcaatcccttgggtattctcatggtcacaaagccgtatcatgttcccaggttggtatggtgttggttcagcattcaaaaactttattgacgctgaagaaggaaacttggcaaaacttcaacatatgtatgaaaaatggccattcttccattcacttctttcaaatgttgatatggtcttgtctaaatcaaatatgaacattgctttccaatatgctcaattggcagaaagcgaagaagtacgcgatgtctttaatactatccttgacgaatggcaattgactaaaaatgttattttagcaatcgaaaaacacgaagatttgttggaagaaaatccttcgcttcaagcaagcttagactaccgtttgccatacttcaacgttttgaattacattcaaattgaattgattaaacgtttacgtcatgaagaattggatgaggattacgaaaaactcattcacacaactatcaacggtattgccacaggattgcgtaattctggctgatatcaaaatattctgaaagtctgagattaacttctcagacttttacttttttttagggtcgaaagatgatataatggcatatgataaactcgaatgtatgtaggggaatctatgaaaattgataaaaggcatttattaaattattctatccttgtgccttatttaattctgtctgttattgggctgattgttgtctattcaacaacgagtgcgacacttgtccaatatggtcttaatccgtttgcgtcagtattaaaccaagggcttttttggatagtcagtctgattgccattctttttatttataaactgaaattaaactttttaaaaaattcacgaacgctgaccatgacaatgatggtcgaaattattttgttgctcattgcgcgtttcttcactaaaaccgttaatggtgcccacggttggattgtcattggaccgattagtttccagccagccgaatatttgaaaattatcattgtttggtttttggcatttacctttgcaaggcgtcaagaattgattgaaacctatgattaccaagcacttaccaagcgaaaatggtttcctagaaaatggagcgatttgaaggattggcgtgtttattcgttagtcatgatattgctggtcgctgcccaacctgaccttggaaatgcggcaattatcgttttgacagccttaatcatgtattctgttagcggagttggttatcgttggttttcagccattttagctaccgtaacagctttgtcagctgctttcttaggtttgattgcggttgtcggggttaaaaccatggaaaaagtcccagtctttggttatgttgccaaacgtttcagtgccttttttaatccatttgatgatttaacggactcaggacaccagttagcacattcgtattatgccatgagtaatggtggctggtttggtcgtggtttgggaaattcgattgaaaaagctggttacttacccgaagcaacgacagactttgttttttcaattgtcattgaagaacttggtttaattggtgcggggctcattttagcattgctattctttttgattttacgtattatgcacgtgggcattaaagctaagaatcctttcaactctatgattgctcttggtatcggcgggatgatgctcatgcaaacttttgttaacatcggaggaatttcagggcttattccgtcaactggtgttactttcccattcttatcccaagggggaaatagtttgctagttttatcagtagctatcggctttgtgctaaatattgacgccaatgaaaaacgcgaagaaatcatccgtgaagcagaagaagaattaaaagccaaggaaataacacaagaatacgatgacaacgttatcgacctagatagtttttattagaaatctcccctttgcgggagtttttttgtaaccaaaagaaatgtgattcgttataaaagtgaaaagggatattactagctagaaaataacttttctaattttatttaggaggcattctatgaaaaaacggttttctaaggttttaacaactggtgcaatagctttaagtttatttggtggagcagtcgcctatgcagcaacagtaaatgtcggtggcggtgtttggaattatggaaaatcagggggatatgcttattcaaattatttccatggttcgagaacgcactcatcggcagtaaaagtaggtaatgcaacaaatcatagtggctgggttggaaaaggtagctggtcatacgcttccattcctacttcaataactcaagttgaacaattttattataattataaataaactgttcttgtaattgtaatgaccgcgttttaccagattgtaaacgcggtttttacattagataatgggagaaaatgatgaaaaggctttggacgcttctgttcacttttagtgttacagtcttatctatcttaacgattgttctgtatcaaagtaaagaattatacgattttatttatcaatatgggaaagatactcttgtcattgaagtaaccgaagtggatagtgaattatccaatcaacaaataatagaaaaactagaaaatatagcagaaaagtatgatgtgaatttatcgcagttatcactttatatttctgaaaaatctgtggataattttattgtttatagtaaagtgacgaatgaatcagagtttaaaaagcagtatcaaattgattctgatgtggctcttgatttgacccaaaatcaaacacttaagttaagaatctttaataccaattcaaagattagcattaaggatttgaataatcttgatgaagttggttttacaggaatttatcattttggttgcgtaaaaggacagactaaagaaattttacatgagctgagtgagttaggctttaattatcgttactatccgaatccttctgttaaagacatttacttttatatttccagtcaaccttatttcactcctttattggtttctctaataatatttctgatttcatttgtattaatgtcattttatgaagtcttaataagattcaaagagattgcaatttatcagttgttgggatattcaaaaaaaaagatagctagcctatttttaagagaaaaaatcattgtaagtagttttattttaggactatctttcttagggttagcttgctatgatttgcttgttaatcatgctgccaaattagttgcatttctgacattttcattttttattgaagttatttttgaattgtttgttttaatgatttatttcttctctcttttcatgattgtttttgtcgatattaaccaaatgataaaggggaaacgaaatatttcaaacctctcacattttaatgttgctgcactatttatattttcttttttgacactgatgacgggaaatcagattttagaaaatctccacaatcatcagatagctcttgaccaattttcgtattatgaaaaaattaaggatttctctactccgtctgtttatattggctcgaatgataatagcgaggaagaagtttttacaaagattctttattacatacaagagaaatataatgatgtttggatgatggaaccaagtagttattattttgtaagaggatataattcagcattatctcaaagtgctattgatgatttaccaattttgaaagttaatagttcttatttcaatttagttgaaaataatgttattaacagtcaattaattgattcaagtgaagcaactttaaatctagttgttccaaaacaaggagattattcttcgtattatgatgacataaaacaaaaatttataatgtctgtttgggggacagaatctggagaaatcaaaggagcacctgaaaatgtaaaaataaatgtgattaactatgctcctcaaaaatttgtgttaccactatcaaatccgacaattaggctaacacaagttgatagtccaatatttattatttataataatgatcaattaacagttaataatattactagcgcttcctcaatgggtgggctgtatatcaaaacaggagtaaaaattgattcgcgaaggttaagtcagttgtttgagcattatggattgagtagtaatattcgaacagtatcaaatgcctttgtaatggcaaaattaaaaataaatcaattaaagaaagagactcaaatttatattttttcattattgggaatactaacgatttatatttctgtgattgtattttcggtatatacttatattgagaataataaaaagcaattggctataaaatatattcttggctacaattactgtcagagattcagctggtatttaatcattaatcttttagccactttaacagctttcattatcttaaagattgtatcagtaaactgttcttggtttttattagtattggttgtattagaatttatgtttgttagtgtcattttaaaatcaagagcgaatcaaaatattattaaatacttaaaaaatgggtaaggagtgttggaaatgacgactgcaattgaaataagaaatattgataaatcttttgataataatcacattttaagtcaattttcgcaaaacatatcagaaaatgaactagttgctgtggttggaaaaagtggttgcggaaaaacaaccttgttaaatattttatctggtctggaagaaccagacagtggtgaaattttaatttttggtaaaaaaataacaaatagaaatcgacagcgattttatcagaaaacgattgggtttctctttcaaaattttgcattagtagataattggacagtggaggacaatctgaaaattagcttgaaatttcaaccaagaatgaataaacaagagagaaagccaaaaatacaagaggcgttagattatgtagggttaggcgacaaagtgaaaagtaaaatttattctcttagtggcggtgagcaacaacgtgtggctttagctaggcttcttttacaagatagtaaaattattctagcagatgaaccgacaggatcattagataatgaaaataaagaattagtttttagtattctgagagattttcaaattcaaggaaagacagtagttattgtcacacatgacttggcattagcaaatgagtgtgaccgaatcattagtttgtcagaattgacaatggatgcctaatgatttttgaaaagggaggtgagtaggattaagctggatggttatgaggtggaattgttaggattcgctgaggagattagttattatttgcaaaaatcgggggctagtgctgaaaatgcgcgtgatattagccaagatgttctcgttaaaatgctagaaagcgagattgtcctttctttcgagaaaatgcgggcatggatgtaccgtgtagcagttaggctctacattgaccgttatcggcgcgataaaaagtattgggaaatcttgcaacgtgaattctttaaggatgaaaatgtcattgcttttgatagcccagattatgaaccactttatcaagccgtggctttgttaaaggaaaaatatcgcttggtgattgatttgtattacttccagaatctttctataaaggagatttgtcaagttcttggtatttcagcgagtaaagccaagattgatttgatgcgagggcgacgcgatttgcaaaaaatattagagaaagaagggtattattatgacgatttcaaatgattttgaaaaaattgctacgaaaaataagcgaaaaaatcgcttgaaaacagttggaattagtgttggtgcgatgttgattagtgctttgattatctttttagggttacgttcattgacagaacgtcatgcagagatggtcaaagaaaactatctgttgaggtcagagattgcctatcccaatatcgactacaccacttggggctttgaagcaaattcggaatttacagggaccttttattcacaccgttttaaaaatattgacggtattagtgtcccttttgaagagtatcaaggaaattattcaataattcgtcctatgtcagctagtcaaaatgaaggcttggaagaaggagatagcaatagctccaactatacacatggtaatctctataaagtaccaatcttctataatgttaatgcttccgctaagacagtaagtatggaagtcacacaagatattagtaaggttgcagaaatgactggacaggctgtggaagtagcaattacatttgataaaccttacacctatcaagaaattacagacatggtccctgataaccttttggtcaattggtactggattggcacatcgagtactgtggatacagcgaatttagctctagatgcccaattaggtttcgctccgtcttcaattaatgattatgcggctgattttaagaacttcaagtcaaatttaaaaaaggcgattgagtcagatgctgttggttttcgatatagcatcgaagatgaaacattgtcattagaagatgatgccaaaacttacttgaaaaataattcaaattataaaacagcaaccttttctggggttatcctgactgggcgtgctgaaaattttgcccagcttgaagataaggattggatttacgcttcgaatatcggacagagcgtcacaattcagccataccacacacttacgaaataaagaaatcataaataaaatagtaaaatacttgcaattcccgcataatttgttaaaatagtaaggtaaagttagactgtattgcctactgtctatctataaaatatattttattggaggcttttacccaaatggcaaaagaaaaatacgatcgtagtaaaccacacgttaacattggtacaattggacacgttgaccatggtaaaactactttgacagctgcaattacaacagttcttgctcgtcgtcttccaagcgcagttaaccaaccaaaagactacgcttctatcgatgctgctcctgaagaacgcgaacgcggtatcacaatcaacactgcacacgttgaatacgaaactgctaaacgtcactatgctcacatcgacgctccaggacacgcggactacgttaaaaacatgatcactggtgctgcccaaatggatggtgctatccttgtagtagcttcaacagatggtccaatgccacaaactcgtgaacacatccttctttcacgtcaagttggtgttaaataccttatcgtcttcatgaacaaagttgaccttgttgatgacgaagaattgcttgaattggttgaaatggaaatccgtgaccttctttcagaatacgatttcccaggtgatgatcttccagttatccaaggttcagctcttaaagctcttgaaggtgacactcactacgaagatatcatcatggaattgatggacactgtagatgaatacattccagaaccagaacgtgatactgacaaaccattgcttcttccagtcgaagacgtattctcaatcactggacgtggtacagtagcatcaggacgtatcgaccgtggtactgttaaagtcaacgacgaagttgaaatcgttggtatccgtgacgacatccaaaaagctgttgttactggtgttgaaatgttccgtaaacaacttgatgaaggtcttgcaggggataacgttggtgttcttcttcgtggtatccaacgtgatgaaatcgaacgtggtcaagttcttgctaaaccaggttcaattcacccacacactaaattcaaaggtgaagtttacatccttactaaagaagaaggtggacgtcacactccattcttcaacaactaccgtccacaattctacttccgtacaactgacgttacaggttcaatcgaacttccagcaggtactgaaatggtaatgcctggtgataacgtaactatcgacgttgaattgattcacccaatcgccgttgaacaaggtactacattctcaatccgtgaaggtggacgtactgttggttcaggtatcgtttcagaaatcgaagcttaattttagttaattaattaagttcccagataacaattattagtcagatagtaattgtggaagagtcccgtaaggggctctttttgtgatttctttgaggtttgtcgctaaaaatcccgtcgaacctttaaaacctgctaaaaatatgataaaataggggagtaaataaaaaaagaagaggtatgtgaaatgtcacgtaaaccatttatcgctggtaactggaaaatgaacaaaaatccagaagaagctaaagcattcgttgaagcagtagcttctaaattgccttcatcagaacttgttgaagctggtatcgcagctcctgcacttgacctttcaacagttcttgctgtagctaaaggttcaaaccttaaagttgctgctgaaaactgctactttgaaaacgctggtgctttcactggtgaaaacagccctaaagtattgtctgaaatgggaactgactacgttgtaatcggtcactcagaacgtcgtgaatacttccacgaaactgacgaagatatcaacaaaaaagctaaagcaatctttgctaacggtatgcttccaatcatctgctgtggtgaaactcttgaaacttacgaagctggtaaagcagctgaattcgtaggtggacaagtttcagctgctcttgctggattgtcagaagaacaagtttcttcacttgttattgcatacgaaccaatctgggctatcggtactggtaaatcagctagccaagatgacgcacaaaaaatgtgtaaagttgttcgtgacacagttgcagcagacttcggtcaagcagtagctgacaaagttcgcgttcaatacggtggttcagttaaacctgaaaacgttgcagcttacatggcttgcccagacgttgatggtgcccttgttggtggtgcatcacttcaaccagaaagcttccttgctcttcttgactttgtaaaataatcaagaaacattgaagtcatttaaacctacttgtcttaggacaggtaggttttttgtgctttcttttttggttatattatagatttgagcgataaaaaatatagcttgtaaagcaaagagcaacaaatttggaagttaagttccaactaaaaagccttgaaacgtttgggtttcaaggcataatttttaatgacgtctcaatatttttttgagattatgaattaatttgtatttgagtgggtgagggtagtaacggaaagttcccatttttcgggtaatgtagccgttatagttttgtttgaagcgcagaacaccatctgaaccgtcaaattctcctgtgatgccaagaagattataagttgtaatgccacgttttatggcttctaacatgacgtattcttgaagcagggcaggtgcgtagaatttattgaactcagggtaagaacctgagaagagatagacagcttcctgtttggtataaacaaataggcttcctgcaaggacaacgttttgtgaaccgtacttgccaatgaattccttagcttctgccatgcgtgtatcaaatgttgcagattgactggataattcgcgaagctgattttgtttcttttcagaaacattgttattttcaatggcagttcggagtttttcgattcgttggtcaagtttggctttatcagtttcaaggtgtgctaaataatcttgaaagttcaaacttgcaaccatgaattcacaagaatctccaaagctatcatagaaatcttggtaataatcaagggatttatcatcgtaatccctgcggtctgatgtggcagaagtgatttccttgaaaaggggcaattcatcacggttaagttttcgtaaggtgatgccgaaggtcttagcttttttgaccaatggacgaccttttttgctaaatgattttagtaacgttttttcatctaagtcagtcaaatctttgacataatgccagtcaggctcaccacctgggtaaccagtcaaaagtccatcgtgttgataaccgagtgatagaaaatcgtctaatagtgccgtgttttcttggtcggttggctgaccaagagtgtcaaaatgctgataggtatcataaggtttgaccagcaattcaagagctccattttctttagcatagctttgaagttcttggtagaattgtttcagatagtgtttatcgcgtgaaacaggaccagaattgatttccatgtggagcccacctgtcattggcaagctaaagagaacggcagcaacttgtagtgtctcttcatcttttagcccaagataggttacttggtacccacgtttttttaataaatccgccatctctaccgattgcataaatgatttgtaagagacggtgttgcaaaaagtctcaaaaacttttttttcgataatctcaagagaggtcattaatggctatttctcctttgtttgcgaatattgtaagccaagtttgaaagtttgtaaaggaatggattgactggaatgttaaattctccaatgaattcttcaatagttgggttgaagtttgatttaaatttagttaaaccgtcatcaagtgttccttcaacaccacccatatttgcccaaataatatcgtcagcgtaagcatcttcgaatacttttggataaagggaatattgtgggtagaatttcttgaattcatcattcataccagcataaagcatttccatgacattaccaaatgatacagataagatacctgcaatgatgagttcatctgggtatttttcaacaaattcttcaaactcagtaatgtattttgtaacagaatttttttgttgtgttaacttagtcaaacgttttttctgatgttcagcagtttcagacaaatctttttcgatttgagcgagttgttctttgtattcagttagacgttttggcaaattaactttggcaaggtgtaggtaagcatcgtcaccgtaagtttccatcattttacggaaataatcttcattacgaagggcaacgcctttacgattttcagtaagagcgacgacatcagcgaaagctttaacgtcatcaattgtaccacggctagtgatgacaccacggtgaatagcatctttcatcaaacgttttgtgtgtttagggaaagttgctgtcatgtcttcttgggtatagacatttgcttggaaacgaggttggatactttcagcaattgttgttgtgcgtccagtccattcgcaacctgcagctttcaagttgtcaatagcagtaagtgtgtctttgttttcgtcaacttcttcaccgattttgtattgtttaagcagtaaagcagggtccattttgatgaagagggagcgttttgttttaccatacttcttaagggagctaatgacaaaggcaacgagttctttgtcactgtagtccatgattggtccacgagggatataaagcatggtaaagccaagtggcaaagctttgataaggatagaagcagaagcaactaaggcatcgtctttgtagaaaccaatgcgttcgttatcccaattatctttaatttttgcccaatttgatgattgtaaaaggtttgtttggttacttgattttgcaaaattatcgtgttcttccgcagaaataccgattttatagctatacattattttaagacccactctctaagggcgtatgcaacgccactttcttcatttgattttgtaatatatttagcgatttctttgagttctggtgtaccattttccatgacaacagggttaccaacggcttcaagcatggcacggtcgttttcagcatcgccaatagccatggtttggtctttgctaagccccattttttcggcaaggtgtgtaatggcattgcctttgctagcatttttgttcatgaattctaggtaaaatggtgttgatttgacaatggtgtatttgtcataaaattcttgtggaattttagcgattgcagcatcaagaatttcaggttcatcaatgaacatcattttaataatttctttatcgcccatttcttctggggtgcgataaaagattggcatgttaaccagggttgattcgtgaacagtgtatttaccaatgttgcggtttgcagtgaagataccttctttggtaatagcgtgcatatgaacatctaacttacggctaaggaattcaatatcaagataatcatcgtaagtcatggtttcagtgataatgttctcaccagtagcggtatcttggactaaaccaccattgaaagtgatgacataatcgcctgattctttcaggtttaattcatcgagaagtgtttgaacgcctggaattggacgtccagtagcaatgatgactttaacaccttgttttttagcatcttgaacggcttcaaaaacttcaggtgtgactttgcggtcattggtcaaaagtgtgccgtcgatatcgacagcgactaatttaatagacataaggttattttacccttcctaaagaatctctacctatctatcttactaaaaagtggcttatttgtcatggggaacacaaggaaatctgaagtggaacgttttcaatgctaaataagtcatgatacgctcttaaaattaattatgataaacaaaatgttcgtttgaaatatagctcataaaggctttcttatcaacagcaaataggtcgttatcaactagcatttcttttggaaaatagaatcgtctatcgccataaatagtacccgttaaggttttgacgattggtgaaattgttgataattctacaacagagccgtctttttgaatcatgttaatctcggttcttggttcttctttttcaggacggtaaatgtcataaggcaagtcaaaattgacatggatgcctgtgtaataatcagggtcaaagccaacagatttgacaaggtcaacaaggtgactgagttctttgcgtgacgattcttcgaaagtcaccgatttaaagactttacgattgacaaaacggcttgccaaatcagccaaaatctcatcttcagcagtcatccaagtttgaaaataggtattcatcaccccatcatctaaagcaagataatcagctaagttagcatgattttctaaaaatggaatcagatttggtgaggttctttcaaagaaatcggtatcagtttggtaaaggtattttgcgcgctttaaaagattttgtaacaatacttccattccgcgactagcagggtgaaaatacacttgcatatacatttggaaacgactgacaatatagtcctcaacggcgtgcatgccattgtattcaaaaacaataccgtcttcgtttgggcgaatcacacgtagaatgcgattcaagtcaaattgaccataattagcgccgctatagtaagaatcgcgcaaaaggtagtccatgcggtcacagtcaatttggctagaaatgagttggacaacttgtttattatgataagtgtggttgataacactagcgactttttctggaaaatcaggcgagacacgacgcaagatagtattgatttcagtatctggactggtgataatctcttgtgtaacggcttcgtggtcggtatcaaagagtttttcaaaagtgtgtgaataagcaccatgtccgacatcatgtaaaagcccagccaccatcgttaagagattgtcgtcagaattccaaatatcaggaaatttgtcatcaaaaatttcagtcacacgtcttgcaatctcgtaaacccctaaacagtgtgagaagcggctgtgttctgcaccatgaaaggtgaaaacagttgtcgaaacttgtttgacccgtcgtaggcgctgaaactctttactattgataaggtcgtaaatgacctgatgattgacagttatatagttgtgaacagggtcacgaaatactttttcattcatactttcattataacaaaaaactttgtaaagctgatttttgaaggtttgggatatttacgaatacttggatttgatttataatgttgactatgacaaatgaacttattcttcgtatgattcaactttttttgatttttctcatcttttggacaatgggaaatattctggtaaatgctaaaaagcatggcattaatttaaaggaaaaattctggacggggctatggattggttacgtgacagatttattagatacgctagggattggaacctttgcaacgagtacagcactttttaaagcgacaaaactggttgaagatgataaaaaaatccctgcaaccctatcgacagcgcatattattcctgttttgattgaagcgctttgctttattaccattgttgaggttgacttgaccactttatttgctatggccatagcatcttttttaggagcatttgtaggaacacgaataactaaaaattggaacacacgccaagtccaacgtgttttgggaattctgttaattgttgcagcattcattatggtttaccgactgattgccaatcctggggcaagtatttctgaaagtgctcatggcttacatggtatttggattcttgtcggagtgatgtttaattttacggttggtattttgatgacaatggggctaggaaattatgcaccagagttaatctttttctcaatgttgggtattaatccgtcagttgcactgcctgtgatgatgcttgatgcagctgttatcatgtcagcaagtacgacagattttattaagtctgggcgtgtcaactggcctggtgttttaggaattattatcggtggttcttttggtgttctgacagcagcatttttcttgagcaaacttgatattaatcattttaaaattttgattgtctttattgctcttttcacaggaacaagtttacttcgctcatctgccattaaacgttaggcttatagtggctttaacacgtcaaaattgctataattttagggaaaggaaagacatttttatattacatgaaacttcacattaagaataaaattgatttggatgggcaggttgagctgcttgaacaatcttatcctgtcaaattaacggaaaaaaatggacatatttaccttacttataccaatgaggaagaagaaacggtgatgctcaaatgcaacgagcaagagttggtcatgacacgttattcaacgccgaaatcaattatgcgttttcaccgtgaaaatcctgctttggttgccattccaacgccagtaggcttgcagcatttacaaacgcaaacaagtgtttatgagttggatgctgaacaacaacatcttaaaattcattatcaactcaaacaagttgatggtgagagtgtttttgcgaattatcagctagaaattcattgggcataaacacgctataaatccgatattataggcgtttgagtgggaatgtattcagttgacaaaaaaggtaaaaattgatatgattactctgtattcaagggagtagcaggcgatttttacctttgtttttgcttcctctgttggcgccttgttttgttggatttaagtccaatttgcaattgcggtgcttaggatgaacaaaacgaatggtaaacattcagtgcgcatttgtgactgaaaaatcgcgtttatgtcgtcattacgaaatcattgatttccggcataatcttaaacagcgagacttgttttttaaaaaacaggtctctttttctatttaaaggagaccagaggaggaagctattttgtctaaagaacaaagtaaagccttgttttacacacaaggaaaagatgaaacgttagaagcgttgcaatcatcacgtgaagggttatcgacagcagaagcccaaaaacgtttggacgaatatggtcataatgaacttgaagaaggtcaaaaacgaggtttacttgcaaaatttcttgaccaattcaaggatttaatgattattattttattggttgcggcagccctttctgtgattaccgaaggtactgaaggtttgacagatgcgcttatcattttagcggttgttatccttaatgcagcatttggtgtttaccaagaaggtcaagccgaagcggcaattgaagcgctcaaagacatgtcaagccaaatcgcacgtgtccgccgtgatggtcatgttgtcgaaattgattcacgagaattagttcctggtgatattgttatgcttgaagctggtgatgtggtgcctgcagatatgcgtctcttggaagctgcgtcattgaaaattgaagaagcagctctgactggtgaatctgtccctgttgataaagatttatcggtagatgttgcagctgatgcgggtattggtgaccgagttaacatggcttaccaaaactcaaatgtcacttatggacgtggttcaggtgttgttgtcaatacaggaatgtacaccgaagttggtaagattgctgatatgcttgcaaatgctgatgaaacagacacaccactgaaacaaaaccttaaccaattgtctaaagtgttgacctacttggtggtaggtattgctattattacctttatcgtgggtgtctttgttcgtggagaagctccgcttgaaggcttgatgacatctgttgctcttgctgttgctgctattcctgaaggtttgcctgccattgttacaattgtgctctcaatggggacaacaacactggctaaacgtaattcaatcgtgcgtaaactccctgctgttgaaacacttggttcaactgaaattatcgcttcagataaaactggtactcttacaatgaaccaaatgacggttgagaaaatttataccaacggtcaattacaaagctctgctagtgaaattgcaaaagataacaatacgcttcgtatcatgaactttgcaaacgatacgaaaattgacccaaatggcaaattgattggtgatccgacagaaacagcacttgtgcaattcggacttgaccatagttttgatgtacgtgaagctcttaaagaagaaccacgtgtggcagaattgccgtttgattctgaacgtaaattgatgtcaactattcataaagaagctgatggtaaatactttgttgcagtaaaaggtgcaccagaccaacttcttaaacgtgtcactcgtattgaagaaaatggtcacgttcgtgagattactgcggatgaaaaaaaagctattcttgctgttaataaggaattggcgcaaaaagctcttcgtgtcttgatgatggcttacaaatacgtttctgaaattccaacacttgagtcagaaattgttgagtctgatttgattttctctggcttggtcggaatgattgaccctgaacgtccagaagctgcaaaagctgttgctgttgctaaagaagctggtattcgtccaatcatgattactggagaccaccaagatacagcggaagctattgccaaacgccttggtatcattgaagatgatggtcaagaccacgtctttactggtgctgaacttaatgaactttctgatgaagaattccaaaaagttttcaaacaatactcagtttatgcgcgtgtgtctccagaacacaaggtgcgtatcgtaaaagcttggcaaaatgaaggtaaggttgttgccatgactggtgatggtgtcaatgatgcgccttcactcaagacagccgacattggtattggtatggggattacaggtacagaagtatctaaaggcgcttctgatatggttcttgctgatgataactttgctacaattatcgttgcagttgaagaaggacgtaaagttttctcaaacattcaaaaatctattcaatatcttctctcagctaacatggcagaagtctttacgattttctttgcaacattatttggttgggatgtgcttcaacctgttcatcttctttggattaacttggtaaccgatacactaccagctattgcgcttggtgttgaacctgccgaacctggtgttatgagccacaaacctcgtggtcgtaagtctaatttctttgacggtggtgtcatgggagcgattatttaccaaggaatttttcaaactgttcttgttcttggtgtctatggttgggcgttgatgttcccagaacatgctgctaatcgtatggtacacgaagatgctttgacaatggcatttgcgacacttggtttaattcaattggttcatgctttcaatgttaaatctgtttatcaatctatctttactgtcggagcttttaaaaacagaacctttaactgggctatcccagtagcctttcttcttttgatggtaacaatcgtagtacctggatttaatgatttgttccatgtttcgcacctaagcgttacacaatggctcgcagttattattggaagcttgcttatggttgttttaactgaaatcgttaaagctgttcaacgtgcacttggacaagatgaaaaagcaatttaaaaatataaaattgaatcagattgattcagcaaaaagcaaatctcacacatgagatttgctttttattataattcaaaaatagtcatggattttcggaattcttgtgccaaattttgacgtttgtaatcagtaaagtcatcaagttttttgacaatgttgtagcgtttgctaagattccaggtctgatttgggttgagttcggggtgttgattgacataatcaatagtcaaatcccactcgcggatataaccaagcggtttagcatggtaagtaatattgtcaatttgctgcgaagcgatactatgatgagtatgcccaaaaatcacgtcgttaacctgatgttttttgaaaatatcatgaaaagcttgactacctaaaaaagcattaaatggtttaaaacgctcgtgttgcaaggtaaattggtaatgtggcacaaaatgcagactgacaatcacgtcattggcaatcgttgataaagttctatcgagtttttgtgttgtttggtgcgtgagttctttgtcggaaaagttgcgatttaaacgtcgatcaaaccagaaagtatttttaaatttgattgtttcatcttcagatttttctgggaaaaaggaataatcataccaaccatgaaaagccaagagtgtcttttgccccaacggaataatctgaaaatccaaatcatcaatcaccttgtcatctaagtcaagcatatcatgatttccgagattataagtaacgtcaaaatgtttgctcattgtttctaaaaatgggtaagagatgtcataaaaatggttggaaatatccccagccaaatgcagatgagaaattttttctgcgtttaatgtgtcaatgagtgtctggatttcaaaatcatcaaactgattcaaatcgatatgtaaatcactcataatagctagttttgtcatggcattattgtagcaaaaaatcttcgaaaaagcccttgatgtgtatttttatctcttctgaaaatatgatagaatattttcaggaggctttcatgataaaggcaataatatttgatatggatggtgtcttatttgacactgagaatttttattttaaacgacgtgagacatttttaggcagtaaaggcatttcggtcaaacacttgccgccaaaatatttcattggcgggcgcatggatcaattttgggaaaatatcttaggtgataagattgcaaattatgatactaaagcactagaagccgaatacacagcttataaaaatactcatcgaccagcttacgatgaattagtttttgccgatgccagcacggttttggcaacattaacagccaagggaatcgtcctagcattggcttccaatagtgcgcgtgaagatgtcgaagatgccttggaaaaatcaggcttaaagcagtactttactcatattttatcgggaagtgaatttgcagaagggaaacctaaccctgctatttataatgccgcttgtgagaaattaggctttgctaaaaaagatattgtgattattgaagatagccaaaaaggaattcaagcaggtgtggcagctggcgtacgtgtcttagccattcgtgataaagtctttggcgttgaccaatcaaaagcagatgttttgattgatagtttgacagaagcgttgcagtttgtcgaaaatgaaaatcataacagctctatttaacattattttttgttaccgttttgtaattgtcctgccttatttgaattatatttttagcttaaaatagaaaatactgagtgttgattttcaacagaaatatttttagtggtgataaaaccgcttatcgtgtgtttttgatacaaatgaagcatggcgtataatggtaattttgcgggctttatggtagaataagaaaacagtagtaatatagaataagtcctaaaggtagcgtgaaaattcaaatttttactttgctttcttgacggacttagtatcttaattaattgaactcgtcctaaaagcgtcgcgaaaaagataatttttcctgtgtcctaggacacagtgtcaaattcctattttcatctcgctttcttaacggacttagtatcttaattaattgaacacgttctacgagctgtgcaaaaaagataatttttcctagagcctaagagctcttcgtcaaaattcctatttttgctttgctcgtttaacgaacttagtatcttaataaaaaggagttatttcatggaagtggctgaaattcgccaaaaaatagtagaaaatcaagagaagttgactagcttcaggaggtctctttgacttagatcgtttggaagaggacattgcgcttcttgaaaacaaaatgactgagccagatttttggaatgataacattgcagctcaaaaaacgtctcaagagttaaatggtttgaaacaaacttatgaaacttttaatgaaatgcaagagttgtctgacgaaactgaactttatttggaaatgttggacgaagatgattctgttcaagctgaattagaggaaagtcttgaaaagcttgataaaatcatgacaagttatgaaatgaccttgcttttatcagagccttatgatcgcaacaacgctattttggaaattcatccagggtcaggtggtaccgaagctcaagactgggctgatatgcttttccgtatgtacacacgttatggcaatgccaaaggcttcaaagttgaaacccttgattatcaagcaggtgacgaagctggtatcaaatctgtcactctttcatttgaaggtccaaatgcttatgggcttttgaaatctgaaatgggtgttcatcgtctagtgcgtatctcaccgtttgattcagccaaacgtcgtcacacgtcgttttcttctgtcgaagttatgccagaattggatgacacaattgaagttgacattcgtgatgatgatattaaaatggatactttccgttcaggtggtgctggtggacaaaatgtcaacaaggtatcaactggtgttcgtttgactcacattccaacaggaatcgttgtagcatcaacggttgaccgtactcagtacggaaaccgtgaccgtgcgatgaaaatgttgcaagccaaactctatcaattagagcaagagaaaaaagcgcaagaagtggatgctcttaaaggtgataaaaaagaaatcacatggggaagccaaattcgctcttatgtctttacgccttatacaatggtaaaagaccatcgtacaggctatgaagtggctcaagttgataaagtcatggatggtgacattgacggcttcatcgacgcttatctaaaatggcgtattgattaactcaaaagtaaaattttaggataacaaaatcgtaaaggaaaatacaaatggcattaattgaaatgaatggtgtaaccaagaagtatcaccgctcaacaactgctttgagagatattaccgtatctgtcaatccaggtgaatttgtttatattgttggtccttctggtgctggtaaatctagttttattaaattattgtaccgtgaagaaaaagtatctgctggaacccttaaagttggggaatttaacctaacaaaattgaaaaaacgtgatgttccaatcttgcgtcgtagcattggggttgttttccaagactataaacttcttcctaagaaaacggtttttgaaaatgttgcctatgcaatgcaagttatcggtgaaaaaccacgtgaaattaaaaaacgtgtaccagaagttcttgatttggttggacttaaacacaaaatgcgttcattcccagatcaactatctggtggtgaacaacaacgtgtcgcaattgcgcgtgcgattgttaataatcctaaagttttgattgctgacgaaccaacaggtaaccttgacccagaaatttcatgggaaatcatgcaattattagaacgtatcaatcttcaaggaacaactgttttgatggcaacgcacaacaaacaaattgtcgataatcttcgccatcgcgttatcgctattgaagacggtcgcattgtacgtgacgaagaggaaggagaatacggatataatgattagaaattttttccgccatttatgggaatccattaaaagtttgaaacgtaatgtctggatgaccatcgcttcagtcagctctgttaccattacattgacacttgttggtgtttttgccgctgttctattgaacgttgagcgcatcgcaacaggtattgaaaataacattcaaattaatgtttatttggatgttgactcaacagatagctctgaaacaacaactaacgaagctggtgaaacagtcgctaatgattcgtatcaccaagtttatgatcaaatttcaaaagtttcaggtgttgaatcagttacttattcaagtaaagatgaacaacttgaaaaattacaacaaacctatggagatgattggtcactttttgacggtgactcaaatccattgcaagacgtttacattgttgaagcagactcaccatcagatgtgaagaaagtggctaagaaaatcgccaacattgaaggtgttgaatctgtcgattatggtggttcaaactcagaccaactcttcagcattgctaaattcattcgtacatggggatttgcaggaacaatccttctagtggttgtggctatcttcttgatttctaacacaattcgtatgacaattatgtctcgtcaacgtgacattgaaatcatgcgtttagtaggtgctaaaaattcttacatccgtggaccattcttctttgaaggtgcttgggtaggacttcttggagcaattgttccatcaattatcatctactttgcgtataagactgtttattcatcagttaatccacaatttgaagtccaaggcttgtcattatatccaattgatacattccttccacttgtcattggaggtatgttcttagtcggaattattatcggagcacttggttcagttatctcaatgagacgttatcttaaaatttaatatcgaaaatgcccttctgatatttcagaagggcattttttaatcaataaaattagtaatggctgaaatgatttggttttcttgttctgtttgggaaatggttgctttaccgtctttggtttgtttgccgtaatcgccaaaaccactgtgattaccaccgacgatagtcaagtattcggtatcgtcagggaggcgttttttagctttttcgtaattgtcccattgcagcaccttatcattgctagcagtgattgataggacttttaaatcactatctgataagtcagttttttcggatgggtagcttgcaagtagaataagcccaaaaatggcttgagactcagaatcagcggcatttaagcaggcaacaacgccacctagtgaatgtccagctaggtaaacattggagagattgtttttcgcaatcacttttaaggctttgttgcttgataaaactggcagattcaaaggtgtttttaagagataaacgtcaaaaccttcttgcgctaagttttttgcgaaacttgcgtaggctgtttcctcgacgagagcgccttggtaaaaaacaatactagctttagcggtgccagaactttgaaaaaacagataatcttttgtactttcggcagttttagcagctgtctgtgcttctgaacttgcttggtaagttttttgatgaagtaccactccactaatggcaattagagtagcaataatcagaaggaaacttaaagtaaatttcttgatttttttcatggctagttaaaatatgggttaaaattcttctcgtgggcaatagtcgtttcacgaccgtgaccagggtaaaccatgaaatgatttggcaagctgaaaagttcagtttttatactatttagtaattgttcagaatttcccgttggcaaatctgtgcgtccgattgtttcacgaaaaagagcatcgccagttaaaaccaattcgtcatctgaaaatactaaggaaacactaccgcaggaatgtccaggcgtttgacgaacatgaaaacgaaaaccagcgatttgataatcgtcatcatactgataatgatgttcggcaggcgctaagacaacatctggcaaatccgcatggcgctccaaacctgaaaaattatctttcggcgaataaagccaagacgcttctttatcagaaatgtaaacaggtgggtgtccaaaagcgtcacgaatgacatcaagccccataatatggtcataatgagcatgtgtgattaaaattgccacaactggtttatcaaatgaggcaatcttttcttgaatatggtcaacatcactacctggatcaacaacaataatgccttggtcattgaccaataaataagtattttcacgtgcaacgtgatttaataatctaaaaatcttcataaaaaaagtgtatcaaaaatttggctaaaagtcatatttgtgaaatgcaacaatgagttgataccaataatcactttctctagcaaggagaagaaagcagtggtttggacgttaacaatctgagaatcgattattgaaggtcgctgccaagaaatattaaaccagcgattaccaactttagtcaacttagagtttcccatgcacaattgattaggcactttttgacgcttactttgcaagctagatttaccacctcaaacaattcttgattatttgagcaatcaatcattattgagtggatttttatgcgctgataaatcaggttttacaaccctgctctcatttttaggacaacttcctagatatgttcttaaaattatgataaacttaaggaaaaattgagaattgagagaatattatgtcaagaccaatgaattttgtaatgatttctccgcattttcctgctaattttgaaacgtttgctgtgcgtttgcatgaggctggttttcataccttgggaatagcggatgctccatatcatgaattatcagagggattacgtgcccatttaacggaatattatagagttgataatatggaagattacgaccaagtttatcgtgcggtagcttatttcgctcataaatatgggcgcattgaccgcatcgaatcacataatgaatattggttagagttagatgctcaattgcgcacggattttaatgtttttggctataaaacagatgatatgttggctgttaaaactaaacgccaaatgaagaaaatttttagtgagcatggattgaaagtggcagcaggggatgtttttcattctgatgacgaagcacgagttttagctgaaaaattgggttttccagttattatcaagccaaattctggcgtaggtgcttcggatacttataagataaaatcaagtgaagaacttgaagctttttttggctatcaaaatccaaaggtagaatacatcatggaagaattcatcgatggtgatattgtcacttttgatggtctgactgaccatgacggggaaattgtcttttattctagtttggagtattcagaagcggttttggataccgttgaaaaagacgatgatatgtattattatgtgcctcgaaccattccaaatgaccttgtggcattagggaaaatttgtgtggaagcctttcatgtgaaagaacgttttttccattttgaatttttccgtgtcaaggaaaccaaagaacttatggcgcttgaagtcaactgtcgtccaccaggtggtttaacaattgatatgtggaattattctaacgattttgatattttccgcgagtatgccaatattgttaaggataatttatttgaagccgaaatcttacgaccatataacgttgtttatatttctcgaaaagcgaatcaaacttatgctcatagcattgatgatatttgggcgaattttggagataacatcatttctattcaatctgttccaggagtgtttgctaagattatgggagaagaaggtattttggcacgtactcaaacgattgaagaaatgcgtgagctggctcaatacgcacaagctaaggcttaatattagaaaaatttgaaaggaagaaccttaaaaatatcgttttaagaggttcagaaagataaaaaatgcattttgaaagaagaagccattggtcaggtgagcttggtaaggaaatgtttttcaatgtttatggtcatgctggaaagccgattatcgtttttccgtcatctggcggaagtcaaaatgagtatggggattttggcatgattgaagcttgtcaagattttattaaccgtggattggtcagcttttacacaccagattcttatgataatgagtcttggcttaatacgtggaaaactggtcatgataaagcactcgctcacgaagcttatgaccgttatattgtgaatgaattggtaccgctgattcgctacgagtcaaactggcaaggtggaatgctagcgactggttgctcaatgggggcttttcatgcggttaattttgcccttcgtcaccctgatttgtttgatgtagctgttgctctttcaggtgtttatgacgctcgcttttttacgggtgattataatggcgaccttgctgtttattacaattcaccaattgactatctttggaatcaagaagatgattggtttttagaccattatcgtcataatcgttttattgtggctgttggtcaaggtgcttgggaagaaccccatattttggataccaagcgtttggaggaagattttgcagctaagtctatccctgcttggtttgatttctgggggaaagacgttgcccatgactgggaatggtggcgtgtgcaaatgccgtattttctcggaaaattggaagaagaaaatagattataaaacaaaataagaagctgagactaaaaatctcagcttcgtttgtttatgctattataggaatttagagttttataaattatgtgctaattaaggcaaattgtagaaattcggcaaaatggtcagcccaatatttttcatgatgaatttcatttgccataatgcgtaattgcacattttccattggaagtcctgtacgtagtagggattggtagtagtgcaaactgcaatcaatataagcttggttcatatttggggcgaattgttcatcaacgtcgtccccttcttttgttccaacttgaatatagactttgctgtcagaatgcagtggatgagagtcacaaaaacgtaaaaagtcacgctcactaaaccaagaagcaagtgaaaaaacacctagatttccaaaaatctctggataggccgcgcccatataagcggtgataatgccgcccatagatgaaccagcaagaagcgtattttgacggtctgtcttggtacgataagttttatcaataaaaggttttacggtatttaccacccaatcaccgtaagccattccgtctccgccagcagaagctgtttcaggagttgttccaacgtcagtcatccaaggagcgtattcattaagacgattatcttgggcgttatcaatccccacgacaatcaatttcggcaactctttgtgattcttgatagtagggataagtttccatgaatagcctgagaatgattccttgctataaaaaatattttgcccatcgtgcatgtaaagaacagggtagcttgcccattcttctttatcgtaatcttttggaagaagaacacgaatgcgtcgctcttcgtcataataaggaacgtacaggctatgttcgaccatttcaaggtaatagttgtttaattttgtctttctcaccataagcacctagcttctgaaaatttataaagtcattataacatagaacatttttttgagccaagataaagctagtttaaatccgttacgcaagtagcagccaagtgtggtataatctatgtgttatgatgcaagtaaattctcaaaaatatgctattgtggatttggaggcaacgggtgcccatgcaatggcagaaattattcaagttgggattgtgattattgaaaacgatgaaatcgtcaagacctatcaaacggatgtcaatccccacgaggctttatctgaacatattattaatttgactggtattacagatgagcaattggcaaaagcgccagatttttcacaagttgcgcaggagatttttagcctaattgaggattgtgtttttgtggctcacaatgtcaaatttgatgccaatctgttagcagaacaattattcatggaaggctatgaattacgaacacctcgcgttgatacggttgaattggcgcaggttttttatccaacttttgagaaatacagtttgggaaatttagctgatgctttagctttagatttggcagatgctcacacggcaatttcagatgcctatgcgactgcgcagctatttttaaaattgaaagcaaaaatgaaaagcctgcccaaggaagtcttggaaagccttttgcctttagctgataaccttttgtttgaaacagggatgttaattgaggaaagcttcaaacaggctaaggttttatcgccaaaagattttcaagaagttggtggcttagtgctacgacaaccaaaaacgattggtgaagcgcgtcaattatcagaagcatttgatgtcaatttggcgcttctgggcttggatgcgcgtgaaaagcaaagtcagtttgcacagttggttaaagatgattttcaatcgtcacagatctcatttttagaagcgcaagcaggacttggaaaaacctatggttatcttttacctttgctccagttagctcaagatgagcaggtcattgtttccgtaccaactaaggttcttcaagaccaaatcatggcaaatgaagtcagacagattcaagacgtttttcacataccgtgtcaatcgattaaaggtcctggtaactatattaaattagatgccttcgcggatagtttgcgacgtgaaggggataatcgtttggtcaatcgttataaaatgcagcttttggtttggctgactgaaacggaaactggcgatttagatgaaatcaagcaaaaacagcgatttgaagcttattttgaccagattaaacatgatggaaatttaagcgaaaaatccctttataaggatgttgatttttggaatcgtacttatgaaaatgcgaaacatagcaaactattgattattaatcatgcttattttttggaacgtgtgcaagatgataaggcgtttgcggctaagaaagtgcttgtttttgatgaagcccaaaaattgattttaaatttggagcaattttcacgtcgtcgtgttaacgtaacgcaattggtacaaaaacttgaaaagtacttagatgcagctttaccgacattggaaaaacgattgatagaaagcctttctttccaattgagccatttggcaacacgtttttaccaaaatcaagaagtctatgtgacaacagaggacgctcgtcgtttagaacaaacaaccaatgaattgctggctttcaatcctgattggcgatatatttgtttggaggatttgttagccttatttgcgcagccttttactgatttttggtttgagacaattgttgaaaatgaaaaacgtcaaacttacctaaatgctagtagtgaagaattgttgaattttcaagaatttctacccgaaacacgcaagacttatatgatttcggcaaccttgcatatcagtccgcaggttagtttagctgatttgctaggctttgaacactatcatttcatgagcattgcgcatgataagcagaatgcccaacatatttggattgatgaggaaatgccaaatgtagctgatatttctgaggaagaatatgcttcagccattgcggaacgtatttatcagttgaaacaattggatgagccgattttggtgttatttaatgctaagaaaacaatgtttgatgtctctgatttactagatgatatggcacttcatcatttgacgcaggagaaaaatggcacggcttataatgtcaaacgccgttttgaacgtggtgaaagtcgtattctgcttggaacaggcgctttctgggaaggtgtggattttgttcaagctgataaaatgattgaggtcatcacacgattgccatttgaaaatcctaaggatttatttgtgcaaaaaatcagcaatcatttgctagcgcaagccaaatcaccgttttatgattattcattaccattagcaatcttgaaattaaaacaagcgattggacgtacgatgagacgtgacaatcaacgctcagctgtgctcattttagacaatcggatattgacaaaatcatacggaaaaatgataaatgatgctttggcagaagaattttacctttcttctcaaaaattttcaaagagtctaacagaaataaagaattttttgctataataaaggggataaactaaaagggagaagtaaatgaaaaaattaacaccagtaaaacagtatttacttggttttagcttgattttcttagttctcttgatttctgtggtgacagttttgtatctatcagtgaaaccaagactggacgcagaaaaattggctacccaagttgccgttgaaaaagctgatttgacagacacatcttcagttgacctttataatggttcagagacttattatagcgtttatgggacaacatcatctggagagcaaaagattgtgtctgttggcgaggacaatggtgaagtttatgtctactctgtaaatgatggtattagtcgtaaagaagctaagcaagttgcgacagcaaacggagcgactggtatttctaaggttgtttatggtatttatgacgaaacgcctatttgggaagtaacagctactaatggttattatcttgtgaattttgaaacaagtgagctcgtgaagaaggagggcatatgacaaacttatcaaatcgcgtgttgaacatggaagaaagtgtgacactagcagcaagtgcgcgtgctaaagccttaaaagcagaaggtcgtgatattttatcacttactttgggagaacctgattttgtaactcctaaaaatatccaagatgcagctattgaggcaattcaaaatggtaaagcaagcttttacacagttgcttcaggactacctgaattaaaagatgctattaatagctatatggaaaaattctatggctattcaatcaatcgtaatcaagtggttgtggcaacaggtgcaaaatttatcctttatactttctttacaactgttcttaatccgggcgatgaagtcattatcccaacaccatgctgggtgtcttatgttgaccaagtcaaaatggttgatggtgtgccagtaactgttgcgacaactgaaagcaatcatttcaaagcgaccgttgaacaacttgaagcagctcgtacagaaaaaacaaaagttctcttgttaaattcgccatctaatccaacaggtatgatttacacacgtgatgaattggaagctatcggaaattgggcagtagaacacaacattctaattcttgctgacgatatttatggacgtttggtttataacggtaatgaatttacaccaatctcaagtatttcagaagctatcagaaaacaaactgttgtggttaacggtgtttcaaaaacttatgccatgacaggttggcgtgttggttttgcggttgctgaagaagaaattatttcaggaatggcaaaagttattagccaaacaacctcaaatttgacagccgtttctcaatatgcagccattgaagctcttactggtccacaagattctattgagacaatgcgtcaagctttcgaagaacgccttaatactatctatccattgcttaatgaagttcctggatttgaagtgattaaaccacaaggggcattctaccttttccctaacgtgaaaaaagcgatggaaatgaaaggctatacagatgtcacagcatttacaacagctattcttgaggaagtaggtgttgctcttgttactggtgcaggttttggtgctcctgaaaatgttcgtttgagctatgccactgacttagacacgttgaaagacgctgttaatcgtttgaaagcctttatggaaaaataagctatgtctaaaagacgaaaaatcattattgtattagtcgcctttttaggaatggtattagtcggattgggaattcatttcaaaccaagttctcccaagctaacagaacttggagattatcgtgttagtacagatgaaaagacctttgaaattgacttggctagtaacagcagcacgggatattcttgggtagctagtgatgttaatagcgaagctattactttagaaggtgtaacttatcacacttatccaagtaaatcagataccgtaggttctggcggttatagtcaattgacaggaaaggtgacaaaatctggaaagcaatctttcaagttaacctattgtcaagactggaacggcggcgaaaaagaaatgacctaccaagtcacaatcaatagcacaaaaaataaaataagtaagattaaactgacagaagtgtcagagtaatagttgaaaagaggaaatatgtctaaagattacgtatctattattgatgttaaagaccatgttggtgaagaagttacaatcggtgcttgggttgccaacaaatcaggaaaaggaaaaattgccttcctacaacttcgtgacggaacagcattcttccaagctgttgctttcaaaccaaacttcatcgaaaaatttggtgaagaagaaggaactgaaaaattcaatactatcaaacaccttaaccaagaaacttctatccttatcacaggtattgtcaaagaagattctcgttcaaaatttggttatgagcttgatgtgacagaccttgaaattgttggtcattcagaagattacccaatcactccaaaagaacatggtacagatttcctaatggatcaccgtcacttgtggttgcgttcacgcaaacaaatggctatcatgcaaattcgtaatgcaattatctatgcaacttatgaattctttgataaaaatggcttcatcaaatttgatagcccaatcttatctggaaatgcggctgaagattcaacagaattgtttgaaacagactattttggtacacctgcttacttgagccaatcaggtcaattgtaccttgaagctggtgctatggcgcttggtcgtgtctttgacttcggtcctgttttccgtgctgaaaaatcaaaaactcgccgtcacttgactgagttctggatgatggatgctgaatattcattcctttcacacgaagaatctcttgatcttcaagaagcttatgttaaagctcttatccaaggtgttcttgaccgtgctccacaagcccttgaaatcttggaacgtgacgttgatttgcttaaaaaatacattgcagaaccattcaaacgtgtttcttacgatgatgctatctcgcttcttcaagaacatgaaaatgacgaagatgctgattacgaacacctagaacacggtgatgacttcggttcaccacatgaaacttggatttcaaactattttggtgttccaacattcgttatcaattatcctgcaagcttcaaagctttctatatgaagccagttcctggtaatccagaacgcgttttgtgtgctgaccttcttgcaccagaaggttacggtgaaatcattggtggttcagtccgtgaagatgattacgatgctcttgtggctaaaatggatgcccttgaaatggataaatcggaatacgaattctaccttgaccttcgtaaatatggttcagtaccacacgctggatttggtatcggtatcgaacgtatggtaacattcgtggctggaacaaaacacatccgtgaagccattccattcccacgtatgctacaccgtattaaaccttagtatatataaaaagacgctaataggcgtcttttttgtatgcaggataacgagtacgactatttgaagcgcttttaaaatttggtttcttttaagttttctttgttatgtttttagtggaggtgataaacatgataacttatatcacggagattaccttttttgattcaatttttcgtgttgctctaaaacttcaacgaataccagaaaaacttttactggaaataaaacgacaactaaatcaagtcgaacacgacttgaaatcttgggaagaaaaattttcccacagcgataactttttttctgacttagaacgattttatagggcattttttatgtggattctacaaaataatttctcaaaacttgggcaacacgaagcaattgtttcaatcacttgtaagaaactttaataaaaggttagattacaaaagccagctgatttcagctggtgtttttatgcagagtaatcaaaaaaatcctcaaaacatctttgcaaaaatgcaataatgtgttaagatagtagctaaaaaatttattaaggaggctaacttggataaaacaacattaaaggatttagcaaaagcagagttacattgtcatttggatggttctatctcgctgggggtcattcgtcaattggcagaaatggcaaatataacggtgccagagtcagataaagagttgaaacaattggtggttgcgccagaaaatgcagaatctttaatggattatctcaaaacttttgattttgttcgtccacttttacagaccaaagaagcgctacatttggcagcttatgacgttgcaagacaagcagcacaagaaaacgtgatttatactgaaattcgttttgcgcctgaattgtcaatggatgaggacttgagtgcttctgagacggtagaagcagtgcttgctgggctcaagcaagctgaagaagaatttggcattgtcgctaaagtactcgtctgtggcatgaagcagtcgccaaaagaagtgacgcgagatatttttgaacatgttgttgagttagctgaaaaaggtttggttggttttgatttcgcgggaaatgaattggactttccacctgctcaattggccgatttgattaaagaaacacaagcgctaggacttccaatgacttttcatgctggagaatgtggctgtgcgcattatattgcagactctatcgcccttgatattaagcgcatcgggcatagtacagctatttacaatcagcctgaattaattcaagagttcatcgaaaagggtgttacagcagagctatgtttaacaagtaatttacagacaaaagccgctaaatcattggatgaatttccatatctagctttaaaaaatgctggcgctaaaattacgattaatacggataaccgaacagtttctgataccaatttaaccaaggaatatgctctttttgtcaaacactttggggtaagcgtagctgattttctagcctttaataaaaatgctatccaagcttctttcacaaatgaagcccaaaaagctgaattattatcaaaaatagacaatttatatgaaacatttctgtaaaaatatgctacaatagtggtaatttatgtttggaggaaactatggctttagttaagattgtctatgccagcatgacaggaaacactgaagaaattgctgacattgtaggaaataaatttgaagaacttggacacactgtcgaagttgacgaatgcacaactgttgatgcagctgattttgaagatgctgatgttgctatcgtagcatcatacacttatggcgacggtgaattgccagacgaaatcgttgatttctacgaagatcttgccgacgttgatttgtcagataaaatctttggtgttgttggttctggtgatactttctacgattatttctgtaaagcagttgatgaatttgaagctcaatttgcattaactggtgctacaaaaggtgctgattctatcaaggttgatttgtcagctgatgatgaagatattcaaaaattggaagcttttgcagaaacaatttctgaaaaagtaaattaatcaaaaagaggttcaacctctttttttgttgcctaaatgctgataaaagttatttttatgttaaaaagctgtattttaatactttttatgtgaaaatctttgccaaagaaggtataataattaaaatagcaaggctttgatattactgaattttgaagcgttttgcagcaatttaagtaattttctctctttgcagagtttgactgataaagaaagttttagttggtcatataaggacgaagtcttgtttagaaatgaggttttatatggcaaaaaatagagaatacgattacggttttcacgatgatgtcaatccgacctattccacaggtaaggggttgacagaggaaatcgtacgtaatatatcaaaggtgaaaaatgagcctgattggatgcttgagtatcgcttaaaaagtttggagttattccataaactcccaatgcctgattggggtccggacctttctggaattgattttgatgatgtcatttattttcaaaagttatccgaccgtcgtgccaataactgggatgatgttcctgacaaaatcaagcaaacctttgaacgtcttggaattccagaagcggaacgccaatttttgtcaggtgcagtagcacagtatgaatctgaagtggtttaccacaatatgaaagatgaattcaagaagcaaggcattatctttacagatacagacactgccttgcaagaataccctgaccttttcaaaaaatattttgggaaaatcgtctctaatagcgagcataaattcgctgctttaaacggtgctgtttggtcaggcggaacctttatttacgttcctaagggcgtgcaatgtgaaattcctgttcaaacctatttccgcattaatggtgaaaacgctgggcaattcgaacgtagtttgattatcgtagatgaaggtgcttctattcaatacatcgaaggctgtactgcgccaaattacacaaccaatagtctgcatgcggcaacggttgaaattatcgttaaacgtgatgcaagtttccgctacacaaccattcaaaactggtctgacaatgtctataatcttgttaccgaacgtggaacagttgaagaaaatggtatgttagaatggattgacggtaacctaggaagtaaggttaacatgaaatacccatgttccatcttaaatggaccacacgcccgaacatcagttctatctatggcatttgcaaattatggacaacatctggatgcgggttgtaaggtatatcacaatgctccacacacttcttcaaccttgatttctaaatcagttgccaaagacggtggtaagacagactatcgtggttctgtttattttggcaaaaatagcggtggctcaaaatcccacattgaatgtgatacgattctcatggatgatttatcaagttcagatacaattccattcaatgaaattcacaattcaaacgtggctttggaacatgaagctaaagtttccaaagtatctgaggaccagttgtactatatgatgagccgaggtatttcagaagaagaagcaacagcaatgattgtcaacggctttatggagccaattacgaaagaattgccaatggaatacgctgttgaattaaacagtctgattaccatgagcatggaaggttcagttggttaatcaaataagatgccttaatcattttagctaatatgttcaaaaagccttcgacactcatcttgtcaagtgaaaaagttttctttataatggtagcggtatgaaaaaatttaagtacgggtacgatgacctacgcaagattttaataacgattggtgttattgcggtagttagctattttgtgatttatgtgatcgggcattgggacattattgtcacttttttgcaatcacgttctcaagctgaaatgaaagctattctgtcgcaattgcgctcaaaaacaatcctcaattttgttattttaattttgttaacggcggttacggctgccattccatttatgtctaatgctatttttgcgatatttaacggcgttgtttatggtcctgctatcggatttttgatgaacgtttttagcaatattttgggaaattttgtttttatcaagattcttaaaatgattgacatcacagatagtgagaaaaaattgaaaaatcgatttgctggcattgacgcacttgaaaatacagattttggaattattttgggctatatgataccgattatgccaacgattcttgtcaattaccatgtcgctgaaaccaaactctcttggcgtaaatggcttctctatataaccatcggagtggctccgagcagttttgtttacgcacttggtggtgatgcggttgttgcaggtaatcttaaacgtatcgtagtgcttttggttattgttgctattgtttatctagtcgttacgtatttgaagcgaagaggtaaaaagaaagcataatataaaaatgagctattagtttagaaagggcatcttattgatgaatttggatactatccgtcaggaaattgatcacgttgatcaggagttggtcgctttattggaaaaacgcatgcagttggttaatcaagttgttgcttacaagaaagccacaggaaaacctatcttagatactagccgtgaagacgcagtgcttcaaaaggcagcaagtcgtgtcgaagataaagcgtttgaacaaacgattgttaacacatttgcagatatcatgaaaaactcacgtgactaccaagcaaaacaacttgacaatgattgagcttgagaggtgtgagaagatgataaagaaactgaaagacaatgaagattattcttatctgctcttgctaaaattagtgctagttagcattgttatcgggcttttggttggttttgttgatactgtatttggtcgcgtgttactttttcttagcgattttcgaacagagcatttcaactatcttatcccatttttaggaattattgggcttttaattgtttttctttatcaaaaggcagatgagcgagcaggtaaaggaatgggcttggtttttgcagttggtcaaagccaagaaaaggaaattccccttattttggttcctctagtcactttggcaacatggttgacacacctttttggaggtagtgctggacgagaaggcgtagcggttcaactaggggcggcgattgctcatggttttagccgtttctttgattttgaaaatagctcgcgcctttttctggttacaggtatggcagctggttttgcagggcttttccaaacgcccatagcagccgttttctttgcattagagattttggtacttggcaaattgcaattacaagctttgcttccgatggctgtcgcttcttttgtagcaagtgcgacttcacactcattgggcttggaaaaattttctcacctagtgagtgcagatttgacacttgatgtgatgactttttgcaaattagctgtactaggcattctctttggcttggttggaaatctttttgcaaaattgttggctattgctaaagaaaaagctaaagatgtcatggataatccttattaccgtatcctatttggtggtatcttattaagtctgatttttttgatatgctatcatggacgttattcaggtttgggaacaaatttgattgaagcaagctttgcaggtaaagaaatttatctctacgattggttactcaaattgcttttaacggtagcgactttggctatcggttttcaaggtggcgaagtgacaccactctttgcgattggtgcatctcttggagttgttttggcaaatctttttggcttgcctgttgaatttgtcgctgcagctggttatatcagcgtatttggtagtgcaaccaatacacttatggcccctatttttattggtggtgaagtatttggctttgctaatttaccatattttgttgtggttatgatttttgcttacagcgttaatcgaaaacattctatctacggcggacaagaagttctgacattttaaatgatttatcagcagagtttgggtaatgactaaactctgcttttaaaattaagtattttttattaaaaattcatcaaaaaagttgcgagatatggctttacaccaccaatgttttttgttaaaatatgaagagtgtgtaatggacacacaaaaatacggctaatccgctgggacaagcacctaatgattagtaagataggagaaaaaataatgaatccattaatccaaagtttgactgaaagtcaattacgtactgacatccctacattccaccctggtgatactgttcgtgttcacgcaaaagttgttgaaggaagccgcgaacgtgtccaagttttcgaaggtgtggttatttcacgtaaaggtcaagggatctcagaaatgtacacagttcgtaaaatttcaagtggtatcggtgttgaacgtacattcccacttcacactccacgtgtagaaaaaatcgaagttgttcgtcatggtaaagtacgtcgtgctaaactttactacttgcgtgcattacaaggtaaagctgctcgtattaaagaaatccgtcgttaattttgacgataactattcgacgataaaaatctgtccttgtgacagattttttcatagctccccttagttcaatggatataacaactccctcctaaggagtagttgctggttcgattccggcaggggagatagaactatattaaaaaagccttgattttaaggcttttttgatttacagagcagataacccttgaattatttcgtctttttttcaaatctttcttacaagaatcagttggtaatttattgaaaatagaaagtatagctttttagtttttgctgaaaatttattttattttcacaagcttttttcctcaattttgattaaaaaatgatataattatttttgatcagaaacgaaggaagtacaatggcgagaaaaaaatattctattgatagtcggattgattattctgtaattttacctgtctttttccttttgttaattggcttggtggcaatctatatcgcaaccataaatgattacccaagcacgattgcaaaagtgatgacacaacaagtgatttggatacttttagggtgcggtgtggcgtttgttgtcatgctatttagcaccgaatttttatggaaaataacgccgttcctatacggtcttggattgatattaatggtgctgccgctcatcttttatagtccagagttggttgagtcaacaggggcgaaaaactgggttacaatcggttcggtaacgttatttcagccctcggaatttatgaaagtgtcctatattttgatgcttgccagatgttccatttggtttcgccaaaagttcaaggaagattctttgaaaaatgactggaaactccttggaatttttgcgcttattaccttacctgtgatggtgctactagggcttcaaaaagacttaggaacagcaatggttttctcagcgattttagctggtttgattttattatcagggatttcgtggtggattatccttccagttgttattatcgttgctcttgcatttggtggtttcatgttaattttccttttgccaaatgggaaagaattcctttatggtttgggaatggatacttaccaaattaatcgtatttcagcttggctagacccgttttcatatgctaaaacaattgcctaccaacaaacacaaggaatgatttctattggtagtggtggtcttactggtaaagggttcaatgttgttgatttatcagtgccagttcgtgagagtgatatgattttcaccgttattgctgaagattttggttttattggtagtgctgttgtcatgggattgtatcttttgttgatttatcgtatgattcgtgtaacttttgaatcaaataaccgtttctatacttacatttcaactggtttcatcatgatgattttgttccatatttttgaaaatatcggagcagcaattggtattttgccgttaacgggtattcctttaccatttatctcacaaggtggctcatcgttgattaccaatttgatttgtgtcggtctgattttatcaatgagttatcaaaacaacctacaccgtgaacaagaaattacagaacattttaaaagaagtgaccgttattaataaaagttgagcgttagctcgacttttttcttatatactaacatgtaaattgatacagtatagactataaaaaaacttaaaaatatgatataatagggcgtatgaattaccatgattatatctgggatttgggtggaacgttgcttgataattatgaaatgtctgctcaagctttcgtgaaaactttagcggaatttggacaatctgcctcgcatgatgaggtttataacaagctaaaagagtccacggatgctgctattgcacaatttatcccaaacgaacctcaatttttaaaggcgtacaaaaaattggaagccgaatatttgaaaacgccagttttatttgcaggagcgcatgacgttttgcaggcaattgttgcaagtggcgggcgaaattttttagtatcgcatcgtaacaaacaagtccttgatattttagaaaaaactaatttgttgtcttattttacggaagtagtcacttcagaaaatggcttttctcgtaaaccgagcccagaatcgatgttgtatttgaaggaaaaatatgacattaaagaagcactggtaattggagatcgtgagattgataggaaggcaggtcaagctgctggctttgacacgttattagttgatggaaaaaaatccttaatggagatagtgaagtaaatgacggaagaaaataaaaatttagcagaattagcgaaagagtatgacgccagtcagattcaagtcttagaagggcttgaagctgttcgaatgcgtccaggtatgtacattggttcaacgtccaaagaaggcttgcaccatttggtatgggaaattgtcgataactctatcgatgaagcattagctggttttgcgactcatattgaagtttttattgaaaaagatgattcgattacagttgtcgatgacgggcgtggtattcctgttgatattcaagaaaaaacaggtcgtcccgccgttgaaacagtctttacggttttacacgctggaggtaaattcggcggtggcggctacaaggtttcaggtggtttgcacggtgtagggtcatctgttgttaacgcactttcaacacaattagatgtcgctgttcatcgtaacggtaaaattcactatcaagaataccgtcgtggacacgttgttagtgatttagctgtgattggtgatactgaccgtcatggaacgactgttcactttactccagacccagagattttcacagaaacaacggtttttgattttgataaattagccaaacgtatccaagaattagcctttttgaaccgtggcttgcgtatttcaattactgataaacgtgagggaattgagcaagaaaaacattaccattacgaaggtggtatttcaagctacgttgaatttatcaacgaaaataaagaagttatttttgaaaatccaatctatactgatggtgaattagacggcatttctgttgaagtagccatgcaatatacaactagttaccatgaaacagtgatgagtttcgccaataacattcacacgcatgaaggtggtacgcacgaacaaggtttccgtacagctctaacacgtgtgattaatgactatgctcgtcagaataaattgctaaaagaaaaagatgacaatttaactggtgaggatgttcgtgaagggttgacggcagttatttctgttaaacacccaaatcctcaatttgagggacaaacgaaaacaaaacttggaaattccgaagttgttaaaattacgaatcgtttgtttagcgaggctttcagccgtttcttattagaaaatccacagattgctaagaaaatcgttgaaaaaggtattctggcatctaaagctcgtatcgctgctaaacgtgcacgcgaggtaacacgtaaaaaatcaggactggaaatttcaaatcttcctggtaaattggctgactgttcttcaaatgatgcaactatgaatgaactgttcatcgtcgaaggggactctgcgggtggttctgctaaatcaggacgtgaccgtgagcaccaagcaatcttaccaattcgtggtaaaatcttgaacgttgaaaaagctagcatggataaaattcttgctaacgaagagattcgtagtttatttacagctatgggaacaggttttggtgctgaatttgatgtgtcaaaagcgcgttatcataagcttgttatcatgactgatgccgatgttgacggagctcacattcgtaccctgttgctaacgttgatttaccgcttcatgcgtcctgttttggaagcagggtatgtttacattgctcaaccaccgatttatggtgtcaaagttggtagtgaaattaaagagtacattcaaccaggtgctaatcaagaaattgaattgcaagaagctatggcacgtcatagtgttggacgttcaaaaccaacggttcaacgttacaaagggcttggagaaatggatgatcaccagctttgggaaacaacaatggatccagagaatcgcttaatggcgagagtttctgttgatgatgccgctgaagcagataagatttttgatatgcttatgggagatagggtagaaccgcgtcgcgagttcatcgaagaaaatgcggtttacagtacgcttgatatttaataagaatattgacgaaaaattactgcatacaatctctaagtatgttataatcgtaatgttatagctattttttacgataaaaagacaatttataaggagttttaaatgtcgagcggaattatattactgcttgtagcaatagttttattagtaattgttgcttacctagttggcgttattgtacgcaagcgaaatgattcattgattgcaagcttagaagaaagaaaacaatcattatttggtttacctgttaatgaagaagtcgaggctgttaaaaatcttcaccttatcgggcaaagtcagacaacatttcgtgaatggaatcaaaaatgggttgacctttctttaaattctttttcggatattgaaaatcatatttttgaagctgaaaatctaaatgatagttttaaattcatcagagcaaaacacgaaattgataatgtcgaaagccaattaaatttagttgaagaagacattaattcgattcgtgaggcactttctgtcttgaaagaacaagaagaaaaaaatagtgctcgtgttaaacacgctttggatttgtacgaaacattacaagcctctatctcagaaaaagaggacaattttggctctacaatgtctgagattgaaaaacaattaaaaaacattgaagctgaattttctcaatttgtaacgcttaactcaactggtgatcctgttgaagcgtctgaagtgcttgaccgtgcagaagaacacactatcgcacttggtcaaatttcagaacaaattccagcgattgttgcaaaattagaagacgatttcccagaccaacttgatgatttagagcaaggttatcgccgtttgcttgaacaaaattatcattttgctgaaaagaatattgaaacacgtttccaagaagttcgtgattctattcgtgccaattcctctgaacttgttacattggatttggaccgtgctcgtgatgaaaatgagcacattcaagagaaaatcgattcattgtatgaattgtttgaacgcgaaattgctgctcataaggctgcgcttaaagatagcaagattattcctgactatttggctcatgctaaggcaaataatgaacaacttgctcatgaaattaagcgtctatctcacaagtacatcttgaatgatagtgaaagtcttagccttcgttcatttactaaaaacttggaagagattgaaacagaagtattgccaatcgttgttgcttttgagacacaagacaagccattctctgaattacaagtgacttttgacagaaccttaaaaacattggctgctgtcgaagaagggcaaatggaagtctttgaacaagttaagaatatcgaagaaattgagacggttgctcgtcaaagcttggaacaatatattaatcgtttgcatatgattaaacgttatatggaaaaacgtaatttgccaggtattccacaagatttcttgagcgcatttttcacaacaagttcacaattggaagtgttaattgatgaacttagtcgtgggcgtatcgatattgaagctgtgtctcgtttaacagatgttgcgacatcagctattgcaaatcttgaaaatgcaacttatcaagtggttcaaaatgcgacattgacagaacaattgttgcaatactcaaatcgttatcgtagttttgaaccaagtgtacaaagtagttttgaacacgctttgaaattatttgaagttgataatgactatcaagcatcatttgatgaaatttcatatgcacttgaaacggttgaaccaggtgtaacagatcgtttcgtatcatcgtacgaaaaaacacgtgaacaaattcgtttttaagacgattgtgttgactgatacaatataaggtttggaaaaattgccaaaccttttttgataactaaaatgaggagtgataatgaaaaagattggtatggtagtggctgttgaaatacagtcagtcatgagaaaatacgctgataatctcaaaagagaagatgtcagaggatttaaagtttattcggttacatttgatgataaaattttatatattacacagtcaggtgcaggagaaatcagagctgctgcttgtacgcaattattaattagcttttttgatgtcgatttaattgttaattatggtgtggtcggcgctcttacggaagaattaaaggtaaccaatatttgtttggttgaaaaggtggttcattatgatatggatacctcagctgctgaccattgcgaagttggacgttatttggaatatcaagatatctatttgccaacaacgacgaagtatgtgcagttggtgaaaaatcatcatccttttattcgtccagttatttgtgcttctggtgataaatttattgctgatgagacaaagaaacgtgccttaaatcatgactttaaggctgatatttgtgatatggaaagtgcagcaattgtcttgagttgtgaccagaataacattccaaatcttatccttaaaacggtttcggacagtataacgggtggtgcggcagaatttcgttcatctattgaaaaagctgcagatatttgtctagaaattttagacgatattctgaaagaactataattaatcagagattctttgaaattagccgacggcttaaagcaagtttgaacttaaaaatgcaaattgaggaacttaaaagaagcatcaaaaaaagactttttcaacctaaatcagctaaatttggctgatttttttgtataaatataaaaatcttgattttaagcttgctattttcagaattttcttgtagaatatttttaaatataaaagtgttgatagaaaaagcctgagacaacagacagagagtgcttggtggtgagaaaagcgtgcaatccttaggcgacacattcttgagcgcgtgtgcgaactcagctgatagagctgacagtagtgcacgacgggtggttccacgttacggagcagaagtcatgtacttcatgagaacagtctaggcgactggctgttgaatcagaggtggaaccacgtttttaacgtccttgcaatttttttgcgagggcgttttttgaatatcagaaatagaaagggcgttattatgacaactattaaaggattgagagatattgaaccttatgtagctggtagccagccaagcggtgaaaatttaataaaattgaatacaaatgaaaatgcttatggaccaagtccaaaagtagcagaagtgttttcacattttgacgttcatcaattgcggaagtattcaactttggaccaagaatcactacgtgttgtgcttgctaagcaacatggtcttgatccaagtcaaatcattgttggtaatggatcagatgatgttttgtctatggcatttcttgcattttttaatagtgatgagcctgttctatttcctgatttgacttatggtttttacaaagtctgggctgatttgtaccgcattaattaccatgaagtgccgttaactagcgattttgagattgatggtaatgattatattgctgataatggtggtgttgttctgacgaatccaaatgcaccgactggcatttacaaatctttagaggctattgaggcgattatcaaggctaatcaagatgtggtggttattattgacgaagcttatattaactttggcggtgaaacagctctgccattgctcaaaaaatatgacaatgtctttattacacgaacattttcaaaagatgcttcgcttgctggtttgcgagttggctatggtatgggaagtccaaaattaatgtcggttattaatgccgttaaaaattcggtcaatccttacaatgttgatttaattgctgaaaaattagctgtggcggctgttgaatcatgggattattacgaagatacgtgtcaaaatattatagcgacaagagattggtttactaaggaattacgagaccttgacttctcagttttagaatcaaagaccaactttgtcttagcggaatgtcctcaaaatgatgcagcgaatttatttgattatttgcaagctaagaatatctatgttcgttatttcccgaaagttgaacgtatcaaaaatcatttgcgaatttcaatcggaacgcaggctgaaatggaacaagtgattgaagcgattaaagaatatcagaaagcctaattttaatgatgttaggagttgacaagatgaaaaaaacaacattacctgtgggaatgcatgataagttatttaaacgtgcgcgtgttacctacaaaatagaacgtgatatcagtgatttcttgatgagtcagggattcaatcgaattgaaacaccgaccttggaacattttgaagtctttagtgatacgattacgaaaaataattacaatttctttgataaaagtggtgaattgctgacgcttcgtcctgatattaccagtcagattggacgtgtcattgcttcgacgcaagttgaaacgccgattaaattctcctattcgggcaaggttttcaaatacaacgaagaaatgcgtggtttgatgaatgagcacacgcaagctggtgttgagattgttggttttccagctaaggaagctgtttttgaggcaatccaatcagctaaggaagctcttgatagagcggatattccgtcttatcaatttgaattttcacatgctgcgattttacaaaccatttttgagactttggctttgccacaagcagttgaagaaactttggcacaagcgattaaagataaaaatatcactcagttaaatgaatttaccaaaaaatatccgagtgaatttgatgagtttttgaaaaatttgccttatctttttggagaaagtcatcaagttttagaaagtgcgcgtgaacttgtcaagaatcaagcgattttggctgctttgacagatttggaaaacttgctcaatcaagtatctgaaattttaccaaagagcaacattgatttggcacaaattccgacaatgccgtattatactggcgtgatgttcaaagtctttggagataaggtgccagacgcttttgcctcaggtgggcgttacgataaactttttgaacgttttggggctaaaaaattgactgcggtcggttgggcagtagatattgatgccgtttatcaagctgtacatgataatttagaaggaggtgcctaatggaaaatcaaattacgattgctttaaccaagggacgtattgaaaaagatacggtgaaacttctggaaaaagcgggttttgacatgacgtttatggaaaataagggacgtaatcttatttttgaaagcccagataaaaaattccgttttttgctcgtcaaggcacctgatgtgacaacgtatgtgcgccatggtgtggctgaccttggtgtggttggaaaggacttgttgattgagcacccaacaggctatcttgaaatgcttgatttgaattttggtttatgtaaattttcagtagcttcaacggattcttatgacccacatgaccataaacgaaaacgaattgccacaaaatacccaaccattgcgaccgattatttcaataaaaaaggagaagatgtcgaaatcatttcaattcaaggaagtgttgagattgctcctgttattggtttagcggacgctattgttgatattgttgagactggaaatacgctagttgctaacggtcttaaagtttatgaagatatttgccgcatttcagcacgattgattgtgaacaaagcggctttgaaaaataatcctgaaatcatgccatttatccaaaaattggaaagtatcgttggaaatgaggaggtagcttttaaatgaaacgtttaacaggaacgacagaagaaatttcaaaaattctctaccaagaacaattagaattaagcaaagaaaatcttgatgttgatgatgcggttcgtcaaattttagaagatgtcaaagaaaatggtgataaagcacttaaagcctattcagaaaaatttgacaagattacgcttgataattttgaagttggcaaggagttggttgaccaagcgtttgaggaaattgatgccgaggttttggaagctctcaaaaatgccaaagcgaatattgaaagttatcacaagcaacagttggaaaaaggatttgaggaccaaccaactgaaggcgttgttcgtgggcaattgattcgtccgattgagcgtgttggggtttatgtcccaggtggaactgctgcttatccgtcatctgttttgatgaatgtcattccagctaagattgctggtgttaaagaaattatcatgattacaccgccacaagcgcatttcgaacctgcgattttggtggctgcttcgttagctggtgttgataagatttatcaagttggcggggctcaaggtgtcgctgctttggcatatggtacagaaacgattcctcgtgttgataagattactggaccaggaaatatttttgttgcgacagctaaaaaactcgtttacggtattgttggtattgatatgattgcaggtccgtctgaaattggtgtgatcgcagatgacacagccaatccaaaatacgttgcagcagatttgctctcacaagctgagcatgatgtgcgtgcgcgtgcgattttggtgacaaattcagcagcgttagcggatgcggttgaaaaggaaatcgaagaacaacttaaaaccttgccacgtgaagaaattgcgcgtgcttctgttgaaaataatggtcgtatcatcattgcagattctgttgaggcaatgtttgaattgatgaaccaagtggcgccagaacatttggaaattgctatggataatgcttatgattatcttgatgcgattgaaaatgcgggttctgttttccttgggcattttacgagtgaaccaatcggtgattattacgcaggggcaaatcatattttgccaacaactagcacaagccgtttctcatcagcgctaggtgtgcatgattttgtcaaacgtatccagtatatgcaatattcaaaaattgctgtgaatgtagctagtcacgatattacaacacttgcttatgctgaaggattacaagctcatgctagagctattgaggtgcgtcatgactaaggtaaatggattattggtaatggatgtggactctaccctcattcaagaagaaggaattgatttattgggtgaagaagcgggtgttggtgagaagattgctgacattactgcgcgtgccatgaatggtgaacttgattttaaacaagcgttagatgaacgtgtcggtttgttgaagggcttgccagaaagcatttttgataaggtgcttgcgcgcatgcattttacaaatggtgctgaaaaattagtggcagaattgcatcgtcgtggttataaagtggctgttgtgtcaggcggtttccatgaaacggttgatgtgttggcaaaacgtatcggacttgattatgtcaaggctaaccgtttagaagttaaagacggtgttttgacaggcaaggttcttggcgaggtcgtcactaaagacgtcaagaaagctagcttgattgagtgggcagctgaaaatggcttagaattaagtcaaaccattgctatgggagatggtgctaatgatttaccaatgattaaaacagctggtattggtatcgctttttgtgctaagccagttgtacgaaaagaagcgccttaccaaatcaacgaagcagatttgtacaaagtcattgatattttagatggtaaaaactagtgacgttacttgcacagaaagaaaaggatattttatgagacaagcagagattgaacgtaatacctttgaaacaaagattaagttgagccttaatttagatgctcaagaaccagtagagattgatactggtgttggtttttttgaccatatgttgaccctttttgcaagacatagccgtatttcccttgtggtaaaagcagatggtgatttgcatgttgatagtcaccatacggttgaagatgtgggaattgttttaggacaagctttgaaagaagcccttggtgataaggctggcatcaatcgttatggtacagcttttgttcctatggatgaaacgcttggtatggcaagtcttgatttatcagggcgtagctaccttgtttttgattgtgagtttgataatccaaaacttggcaattttgatacagaattggttgaagaatttttccaagccttggcatttaatgttcagatgaatttgcatttgaagattttacacggaaaaaataatcaccataaatcagaaagtctttttaaggcaactggtcgtgctcttcgcgaagcgattaccattaaccctgaaatccatggtgttaattcaacaaaaggattgctttaaaatacagagaaaggaaatcagccgtgacacgtctcatttagtagtgtgtggaaggcttgagagctgagatatgataattgtgattgattatgatgcaggtaatactgctaatgtgttaagagctttacagaaaatcggtgttcaggctgaattgtctagtaatcgagacaagattttagctgcggacggtctgattttgccaggggttggtgcttatcctgctgccatggctgagttacaacagcgtggcttggtttctgctatcaaggaagcagtagctaagggaacgccgttactgggtatttgtttaggaatgcaggtcttgacagagattggcttggaacaccaagaaacacaaggacttggctttatcccaggtgtttgtcgtgaaattcaagcaactaagactatgcctgttccgcatatgggatggaatgatttgacagtgaaacaagatagtccgttaacagcagggcttgctggcaaatccgtttattttgtgcatagctattttacagatgttccgaaagaatacattgatgtgactgctgattatggtattgaagtaccagccatgattcacaaggataatgtttacggagcgcaattccaccctgaaaaatcaggtgacgtcggtttaggaattcttgaaaaatttattgccctttgtggtgactaagaatgattttaagttgcttagagtagcgttttataaagaaaaggagtttatatgcagattcttccagcgattgatattaaagaaggacaggcagttcgtctttttaaaggtgatttcaaccaaaaaacggttgttaatccagatgtgcttggacaagcaaaaatctttgcgcaagctggtattgaatttattcacgttgttgatttggacggagcgcttgatgggcgagcaacgaatcgcgatttaattgccaagttgaagcaagaatcagggcttggtgtcgaagttggtggcggtattcgtacccttgagcaaattgaagattacctagcggttggcattgaccgtgtgattatcgggtctatggcagtgaaaaatccagattttgtcaaggcagctttagataaatttggtagtgataaaattgtggttggtattgatgctaaaaatggttttgtggcaactgagggttggctagaaacgagtaatgttgactacatcagcttagctaaagccatggagaaaatgggggtgaccctatttgtctatacagatgttgaccgtgatggcacgctaatgggaccaaattttgaacattatgaacgtttggtggctgagttaacgacggctaaagttattgcttctggcggcattgctgagaagaatgatttggtgaaattgcaagaaattggtgttgctgggacaatcgttggtaaagcttattacaacggcaatattagccttgacgaattgaaagcttttggaggatagcttatgctgaaaaaacgcattattccttgtcttgatgttaaagatgggcgcgtggttaagggggttaattttgttaatttaacagatgttggtgaccctgttgatgcggcgcgtgcttattatgaagctgggtgtgatgaattggtgttcttggacattaccgcaacacatgaaaaacgtgacacaactgtggaaatggtgaagcgtgtggctgaccaagtattcattccttttacagttggcggtggcattcgctcggttgaggacatgaataaaatgctcaaagctggtgcggacaaggtcgcggttaattcttctgcggtagccaatcctcaactcatcaaagattgtgctgaaaaatttggcaatcaatgtgtggtatcggctattgatgctcgtaaagaagctgatggcacttggcatgtttatgtggcaggtgggcgcaaggatactggcattgatttgattgaatgggcaaagactgttgtcagccttggtgcaggtgagattttactaaccagtatggataaagacggcacgaagtcaggatttgatttggatatgctaaatgctgtcgctgatgtggttaatgtcccaatcattgcgtctggtggtgcaggaaatattgaccatatggttgacgtttttgaaaaaacaactgcaacaggtgcgcttgctgcttccattttccactttggcgaagtttcaattgctgacaccaaagctgccatggctgctgcaggaattgaggtgagacaatgagtgaaataaaacttgattttgcgaaacaagatggtcttgttcctgtgattgtgacggattaccaaacaggacaagtgctgatgttagcctacatgaacgaagaagcgtatcacttaacattggaaaccaagcaaatgcactactggagccgctcacgtcaagagatctggcataaaggggcaaccagcggtcattatcaatacgtcaaatcaatcaaaacggattgcgactgtgataccttattggtcgctgttaagcaagaaggtgctgcttgtcatacaggcgcttacagctgttttttcaatgatattttgtgatgatagaaaggataaagacatgctagaaacattatataaagaagcgatagaccgtaaaaaaaatccaaaggaaggctcttataccaattacctttttgataaaggattggataaaattcttaaaaaggttggggaagaagcgacagaagttgttattgcagccaaaaatgcagacaaagatgaaatcgccaatgaaacagcagatgttctgtaccatttggcagtaatgttggtcgaaactggcgttagtattgaagatgttgatgctgttttaaaagcacgccaaggtaagaaaagtaatgtccacgaccgaccagaaattactaattattaagcactgcatttgcatgtttaacaatataaccaaagaagctgagccatgctcggttttttttgtccctttcaaagcaatcgcttgcgcttaaaataacgcaacttatataatatttatttttgaagttctgaataagtctaaaaaatatttacgaaaacgcttgcgtaattttaaaacattttatatactgaaagcataaaaaatcattatgttgaaagatacggaggttctatatgaaaaaggtaagtcggctttcttttcttgaaaaacggcagttttttggaattcgtaagctaaaagttggcgttgcttctgttgctattgcgacggttcttttttggagtgccagtttagcaaatagcgtctctgctgaccaaatcagcgctgaaacagcaacggaattggtagcaaatcaatcggaaatagcagagcaagctattgatgtcgcacaaagtgagattgataccttggctgatacacaaactgaggttgatacgcaaattgaagttgaaaatactgaatcaatagttagcgaagataatactcaaactgctgcggctgaaactgatgttgaccaagctgttgaggaagtagccacaattgaaaacgtagcagaagttaatgttcaagaggcgagtaatgacactactagccttgagcagttagcaacggatgcaactgctgaaaacactacacaaactagtgaggttacacttcttaacgccacaccagaaactgctgagaatacgacacctgccattgcagaagataccattcgagtgcattttcaagaagtgactgatgacaattttagtcagtatagtttatggacttggggtgctgttgctgaaccgtctgacgggaataattggccagcagctgcaacggctttttcagaaaatcaaaaagatgattttggctactacattgatgtcaaacagactgctagccatggtgagattggctaccttctcttaaaaaatggcgagaaaatcagcgattctgaccagaatataacgcctttatctcaagatgttaacgaagtttgggtgacctctgattttaagacatatacctacaaacctctagctgatgatagtattattcgaataaattaccaacgtgatgacggcgattatgatggttggggcgtttgggtatggggagatgtggcaggtgaattttcaacttggccaactgatgcccttgatttcacgcaagagggagcatacggacgttatgttgatgttccgctatcaaaattattagattctaacattggctttttattggttaatcaaaatgacccagacggtgtcggcaataaaacgattgatttgagcttctcagaacgcgatagtcatagccaaatcttcttgcacaatgatgatacgacagtttacaccaacccatattatattgcgacagttactgggcaagatttttcaaaagccacgcctggtgttcatcaagtgactgtatcagccagcagttatcgttcgtttaattataacgaaaccgacttgattgatgttgttgttacgaatcctgaaaatgttgacattacacgtatgcaagtggatacaacggcaattggtggaggcattattgaaatttcgcctgagcttaatcgtgtgacaatcacagcaacttctgacacaacgcctggagactatgacttacctgtccgtgtttatgatagtgacaacggctattatgatacaactgttacggtaaccattacagaacgtgttaagcaagaaggtgaacttgattgggatgaacaagtgatttacttcatgctgacagatcgtttttataatggtgatactagcaatgacaatccttacaatcaagattatgctggagcgattaaccaggctggtacttataaaggtggggatttcaaaggcgtaacagcaaaattagattatctcaaggaactaggcgtaacgagcatttgggtaacaccaatcgtggagaatattccacaaaatgtgggtaccgaagaaggcatggaatactatgcttatcatggttactgggcaagtgattttgaagcgctcaatccacatcttggaacacttgatgatttccatgaattaattgacgaagcggcagagcgtggtatcaatattattgtagatgtggttttgaaccattctggttatggtacggaagaaacatttgcaggtatggttcggacagcagaggaggacaagggcgacgacattcaaggttcacaatctggtctgcctgatttcaaaactgaagaagaaactgtccgtgagcagttggtagcatggcaaacagcttggcttgaaaagtcaacaactgcaaaaggcaatagtatctatgcctttcgtgtagatactgtcaagcacgttgatgacactacttggcaatattttaaaaatgagctagcgctgaaagatgcggattttcatctggtaggtgaaagttggggagcgagctataaggacaccaaaggcgacttgggtactggcagtatggatagcttactggactttggctttaaagatattgcgaagttgcttgttaatggcaatctgaaacaagccaatgaagaattaatcgcgcgtaatgatgtgttgacaagttcttacactttggcacaattccttggcagtcatgacgaagatggtttcctttatagtattggtggtgacctttccaaattaaaagttgctgcaacgctcttattgactgccaaaggtcagcctgtgatttattatggtgaggaactcggtcaatctggtgccaataactggccttattacgataatcgttacgagtttgactgggatgatgttgagggcaatgatgttctggaacattaccaaaaattattagcctttcgtcgtgacaacagcgaattgttagcacgtggtagccatagcacggtagcggttaatgatagtcaacaatggctactggctaaacgtgaaaatgatacggatgctgcgtacattttgtataatcttaaagatgaaagccagactcttcgtttgttattgtctgatgatgccgtggtgacagattattatagcggtcaaacttaccaagcggtgcttggcgaagatggcgcttattatcttgaccttgaaacaccagccatttcagctggcggtaccatgcttcttaaagtgtcaacaggggcaattacgtctgcttttattgcacaaactgaagaagaaccaattgccgaaaataccattcgcattcattttaaaaccttgccgacagatgatttgtctagtttgggattgtggacttgggaagacgttgaaacaccgtcagaatcttggccaaatggcgctatcaatttatccaatctaaaacaagatagctatggctattatattgatgtgaaattggtggacggaaatcgtcagaaagtagggttgctcatcaataataccaatggtgataatttgacaggcgataaagttgtcaatttaatcagtcaagagatgaatgaagtttggtttgatgagaactacgcgattaattattacgaaccacttgaagaaggaacgattcgaattaattactatcgcagtgatggtaattatgacaatttagcgctttggctttggggaagtgttgattcttccgttacagaccgtttggggtcatggccagacggcattgattttgaaaatgtaggtaaatacggcgtttatatggatattgctctatcagatttcaatgaacttggatttctcttattagatgagtctaaggagggcgatgatgccaaaattcagccagacaattatagctttaaagatttagctaatcacacacaaattttcttgaaagacgaggataagacaatttacacgaatccatattttgtaagcactgttcgtttgacatcagctcagcaaacaagtccgacagagattgttgctatcgttagcaatttagctgacgctgataaggatgacttgtttgaaaatgttaaggtaactgataaagatggtaatctgatgactatttctgaccttgtattgaatcctgaagctaatcagttaacgattgttggtgatttttcacaacttttagcaccatacacggttagttatgctggtgatgactatcaagctaagaccaattggcaatatacagattctctttatgcctatgatggtgagttaggtgcgagcgtgtcagaagaaggagcgcgtgttgatttgaccgtttggtcaccaagtgcagatagtgtttcggtggttctttatgataaagatgaccaaactaaggttgttggaaagattgctatggttaaaggtgataagggcgaatggtcagcagctttgacgcaagaatcaggtcttggtgtttctgattatcgtggttattattatcattatgaaatcacacgtggagatgaaacggttctcgcacttgacccttatgccaaatcattagcggaatggaatagtgatttgattggaactgacccgtcatacaaggtagcaaaagctgcgattgtagatactagtacaattggcaatcaagaattgacctacgctgatattagcggatacacagaccgtgaagatgctattatttacgaagcacacgttcgtgatttcacatcagataccgctatttcagatgaactccaacatcaatttgggacttttgcagcctttgttgaaaaattagattatcttcaagagcttggcgtgacgcatattcaacttttgccagtgatgagctattattatgtcaatgaattggcgaatgctgagcgtttgacggactatgcttctagcaatacgaattataactggggatatgacccacagagctactttgctttgacaggaatgtattcagaagacccaactgacccagcaaaacgcattgaggaattcaagaatttgattgctgaaatccataaacgtgggatgggtgttattcttgatgtggtttacaatcacacagctgaccttgctattcttgaagatttggagccaaattattatcatttcatggaagctgatggaacagctaaaacaagctttggtggcggtcgcccaggaacaacgcattatatgacaagacgtttggtgcttgattcaattgcttattgggttgatgagttcaaagttgacggtttccgttttgatatgatgggagatttggatgccgaaacggtgcaaatggcatatgatacggctaaagcactgaatccgaatattatcatgcttggcgagggctggatttcttatgctggagatgctaatgatagccgacaaccagcagaccagacttggatgtcacaaactgatagcgtcgcttctttctctgatgacattcgtaacctcctaaaatcaggttatccaagtgaaggagcggcagcatttattacaggtggcgcaaaagatttgcaaacactctttaataatattaaagctcagccaagcaatttcaccgcagatgacccaggtgatgtgattcaatacattgctgctcatgacaatttaacgcttcatgatgtgattgcaaaatccattcaaaaagacccagctgttgctgaaaatgaagcagaaatccaacgtcgtttgcgtttaggaaaccttattgtcttgacatcacaaggaactgcctttattcattctggtcaagagtacggtcgtacgaaacaattccttgacgaggattacaagacaccagtttcagcagataaagtgccagcaaaatctgatttgttgaccaatgctgacggcacaccgtttgaatacccatatttcatcagtgattcttatgattcgacagatgcgattaatcattttgattgggctaaagccacagatagcgaagcttacccagaaaatacgcaaagccaagcttatacaaaaggtttgattgccattcgccgctcaacagatgcttttacgcttaaaaccaaagaagaagttgaccgcaatgtgagcttgataaccattccaaatgaaaatggtgttgggcaagaagatttgattattgcttatcaaacaattgctagcaatggcgatatttacgctgtttttatcaatgcagataccgtggcgcgtgattttgtattgacagatgattaccgaaatctcctatcagctgaaatcattgcagatggtaagcaagcaggagtagaagcgatagaaaatccaagcggtgtcacaatgactgaaacgggattaaccatcgagccactaacagctaccattttacgtttgaaaaaagctagcgctgaaacggaacgtacactttatgatgaagcaagtggtgttagcgttattttaggagcaggtgaacgtgatgacatcaagaaaattaaggtaagtcaccaagaaacaaatgatgtcaaaacaccagaagttctaaaaggaacagattacgatttgtttgatattcagccaactgacaattttggaaatgtcttagctattacaaaaacagcgcgagttattttaccaattgatgctggcaagactgttgttcaagtcttttatctcccagaaaatggacaaccacagtcactagcatttgaagaaatcagccgtactgtggcagggcaaacattgaaatttgtcatctttgatacggaacattttagtcaatacggcattatttatgctcaagaagctactcaatcatcatcagatatggcaacacaaacctctgctgaaactggcgtgacacctgatgaccaagcgcaagcttctgtcgtggaaacgacaactacacctatcacagtagatgccaatcttgaaacactatcaggtactgatgctgctgatactttaccagcgacaggtgaaaaagatggcacacttcttacctttgcaggtgttttaagcctagcaagcatagctttgctcgaactcaaacgccgcaaaaaatcagaataacttacagtaggcacaaaaagagaggttagggataaaatcctagcctcttaatcatctaaaaataatgtttctatcagtaagcggtgtcgtggaacgactgggtgtgtttctaaaaatgcttttaacttttcttttgccacccattggtacgaaatggtttcgctattttggagagttatggtatctttgggagaatttaccagagcaaggtagctatccataatacaattgtcatctttgtaaacagtcctttttgaaaatgttaattcaactggtacaagcccagtttcttctagcaactcacgtcgaacagcttgtttagaatcttcaccataaagagcagatccgcctgcactagcttcaaaaaatcctggaaaagactctttttctaaatgtctttgcacaaacaaaatatcattgtcaacatgttgcaccaaacaatctactgccaagtggtacaaatcatcaggaattgactgaccacgcgttaagatacgacctgttttttgcccatttgctaaataagcatcccatttttccatgtttttctaacctctttcgttcaaaaaattatataatagtatatatagtaacatatgaaggggagttggtaccatgcacatattgatagcacccgattcatttaaggaaagtttatctgccctcgatgcggcaaaagccattcaaaggggatttaaaaaagcactgccaaatgcgacttttgacttaatgccgattggcgacggtggcgaaggaaccttggaaaccttaactgatggcttgcacctaaggcgtgatagccatattgttacgggagcattaggtcagcctgtggaagctcactatgcgaccaatggtcaattagctgtttttgaaatggctgacatatgtggcttggaaaaagttccacttgataagcgcaatccgttaacattaacgacaaaaggtgtcggtgaaatgattggacatcttgttgaccttggtatcaaagaaatcatgattggcgttggcggcagttccactaatgatggtggtattggaatggcagcaggattaggctatcgtttctttgacgagtctggtcaagaagttgctgcagttggtgataatcttggaaacatcacaacgatttcctatgaagattaccattgggatttatcacaagttgagctaacaattattactgacgttaccaatccactatgcggtcctaatggtgcaacctacgtttttggcggtcaaaaaggacttgcgaacgaaaaattcgcaagtgttgataaggatatggagcaattttaccaaagctttttcccagtaatccttgatttagcgggagcaggagcaggtggcggaatggcagcagggctagctgcgtttactggcggacgaattatctctggtatcgacgcagtccttgatatgcttaactttgaccgtcgagtccaagttgcggatgtcgtcattgttggtgagggacgcatggataagcaaagtttgtctgggaaagcccctgttggcgttgctagtcgtacgccaagaggcaaattagttattgccatttgcggtagcttaaaagatgatttgccagactttccagttgctaatattcaagcagcttttccgattatctcaggcgtcgattctttggaaaatacgctagcgcaggcacctcaaaatctagaacgcaccgcccaaaatattggcaatctactagcctttaccaaacgttaatctttattgaataattttgaccagaagccctttttgggggcttcttttggtttgtcatgtgcttgtggaaaacgcactgctaacagtggattatcaacattttcagcttgattcgaatgaacgataatcccataaggtgaatgcgcatttttttcatcaacgattgttgcttgaatttcaagattttgcgctattttcatatagtaacattggtcggcaaccgctaattttggcgaaattttgacaaatagcgtgtcataatcactcgctagatgttttaaaatatcctcgaaacgttttttagtatcttccaaacgactgtcatcaagcggtattgacaagaccacacgttcggcaaatgttccaaaatagcgtcgttgttcatcaggattaagtcgattttcccctgcagcagcatgtaaaactttactttctaaatcactcatactattaacctcgattatttcttaacttcattataagttaaatttactaaactgtcatttctcagccgtaagcgcataaagtattttgaaaaaagggcatgaaagttaaattggtttttcaaaatttctcgtttttatttgcctaagtggcgatattatggtattattttagtgtaaaaatattaaaaactcataaggagagtaacataatgtcaattattactgatgtttacgctcgcgaagtccttgactcacgcggtaacccaacacttgaagtagaagtttacactgaatcaggtgcattcggacgtggtatggttccttctggagcttctactggtgaacacgaagcagttgaacttcgtgacggagacaaatctcgttacaacggtcttggtactcaaaaagctgttgacaacgttaacaacatcatcgctgaagcaatcatcggtttcgatgttcgtgaccaacaagctatcgaccgtgcaatgatcgctcttgatggtactccaaacaaaggtaaactcggtgcaaatgctatccttggtgtttctattgccgtagctcgtgcagcagcagactaccttgaagttccactttacagctaccttggtggtttcaacactaaagttcttccaactccaatgatgaacatcatcaacggtggttctcactcagacgctccaatcgctttccaagaattcatgatcgtacctgctggtgcacctacattcaaagaagctcttcgttggggtgctgaaatcttccacactcttaagaaaatccttaaagaacgtggtcttgaaacagctgttggtgacgaaggtggatttgctcctaaatttgacggaactgaagatgccgtagaaacaatcatcaaagctatcgaaactgctggttacaaaccaggtgaagatgtattccttggatttgactgtgcttcatcagaattctacgataacggaatctatgactacactaaattcgaaggtgaaggcggagctaaacgtactgcttcagaacaaatcgattacatcgaagaattggttaacaaatacccaatcatcacaatcgaagatgcaatggacgaaaacgactgggacggatggaaagaacttactaaacgtcttggtaaacgtgttcaattggtcggtgatgacttcttcgtaactaacacttcataccttgaacgtggtatcaaagaagaagctgctaactcaatccttatcaaagttaaccaaatcggtactttgactgaaacattcgaagctatcgaaatggctaaagaagctggttacactgccgttgtatcacaccgttcaggtgaaactgaagattcaacaatcgctgacatcgcagttgcaactaacgctggtcaaattaaaactggttcactttcacgtactgaccgtatcgctaaatacaaccaattgcttcgtatcgaagaccaacttggtgaagtagctgaataccgtggattgaaatcattctacaaccttaaaaaataatcgttgatatatcaacgttttaagagcctatctatttcggataggctcttttttgtgtataaagggtagctgaattctgtgatttaaatttaaatatggctagaggttgtttaatacctaatcatctctgctttaaaagtgcttaatttttgattaaggtgactttgttatggtaattaggaagcttgactacaaacaaaaaggactgcgataaactgcaatccttttaaggttatttttcaaattcggctttacttttagtatcggcatactcttcggcgacttcttttgaaagaatgtcatcgtaacttggtagtgtaatactagaaccgtatttattttttagagctgttgtcactaggcggtaagcaaggttggcattacgtgagaggataggtccgtggaagtagctgccatagacatttttataatgaacaccttcagtgccgtcctctttgttgttaccatttccgtaaacgcagataccaagtggtttttcgtcatcagacaagaatgttcgaccttggtgattttcaaaaccatagtaagtttcgttaaattcatcgttatgaattttgatatctccgatgaaacgattgttttcttgattgagggtgtaatgtcccataacaccaataccattgattttttcaccattggcttgaacatagtattgaccaaggagttggaaaccaccacagatagctagaatgactttgtctttgttgatgaagtcagcaatggcttctttcttacttggaaggtctttggcgacaatagtttgttcatagtcttgaccaccaccaaagaaaaccatatcgtagtaatcagcgtcaaaggtatctcctaatgaaacaatgtcaaaggtcattttagctccaagcttttcaccgacatatttcatcatgaggatattaccattgtcaccgtaggtattcatcagattgccgtaaaggtgggcaacgtttaactcatagttgtaatcttttgtgttaggagattgtagcgaagtgtaagtcattttaattcatctcctttccaacggcatggcgactagctagaatttctcggaattgcaacatagcggtataagttgcaaggatataggcgtgctcagttgtttgtgattcaattaatgccataatctcctcgagactttcggcttcggtgatgttgttttcatcgtagcctgtcacacgcaaacgacgagcaatttcagaatgacgaacaccgcctgcaaatgcttgaggaatatccatatctaaaacagcctcgaagttagcatcccaaatccaactggtatcaattccgtcagcgtaattggcattgagtaggacagaaagtgtaaatggataaggggctaattttatcatatcaagtgcttgactagcgccaactgggtttttaatgagaaccaaggtacaagatttatcaccgattttaaaggtttcttggcgtccaaagacggcgcgactcttatcaaaaccagctttaattttttcaggagcaactccgaaaaattcagcaacagacaccgcagcaagagcgttataaatgttatagagaccaccgacgttgattttgtaatcttgaccgtcaatgacaaattcagaagttgtattggtgattttcgtcaattctgtcaaggcataatcgagttttggacggtggaaaccacaattgtcacagacataatcaccaaggtttgcataggtgttcaatttgtattttagaatttgctgacattgtggacacaaaattccttcggtattatagtgtgcgagttctggagtgtgtttttcagtatcaaagccataatatttaacaggatttaccacgtttgtagaattgaaaagtgggctgtctccgttggctaagattgttgctgttggagctttggcagcaccgtctaaaatcatttggtaagtggtgtaaatttcaccgtaacggtccatttggtcacggaaaatattggtgaatacaaagagacttggtgtgatgtattctgtgatttttggcagactagcttcgtcgatttcaagcacggcaatttttttaccagatttggcttttttggctgtcaagaaagttgaagtaatcccagtaatcatattagcaccgcttggatttgtgacgatttcaccaaaagcttcacgtaaaattccaactgtaagagcagtggtcaaagttttaccgtttgttcctgttaccacaacgatttcataatctttagcgatagtgtctaaaatatctttgtcgaatttgagggcgatttttccaggcaaggttgagccacgtcccatttttgaaaggacaaagtgagctgacttcccagccgtgattcccataagtgtgtttactttcatagaaatattgtaccacaaaaagatatattctaataaagaaaatctgttttaaacgtggtataatagaaaggtagttttaattagttagagaaaagagatgcatgtatgagtaattttacggctattgatgctaaattttgggcaactttagttgaaaacccatggacaattgtcgttcacattttggatattttaattgttgcgtattttatttatcgtttaatcaaagcccttgcgggtacgaaaatcatgtccttgattcaaggggtcgtgttctttattttactaaagtttgtagctgaatggattggctttacgacgattacttacttgatgaatcaagtcatcacttacggtgttattgcgggtgtggttatctttgctcctgaaattcgttctggtcttgagaaatttgggcgttcaacacaagttttcttacaaacacagcaagtgagtgacgaggaaaagttggttgaagcactggtgaaatcggtggcttacatgagtccgcgtaagattggggctttaatctcaatcgaacgcacgcaaaccttgcaggaatacatttcaacagggattcctctggatgcggatatttcaagtcagttattgattaatattttcattccaaatacgcctttgcatgacggtgctgtcattatcagaggcaataaaattgcgacggcttgttcttatcttcctttgtcagaatcaatggcgatttcaaaagaatttgggacacgtcaccgcgcagcgattggtctgtcagagaattctgatgccttaacgattgttgtttcagaagaaacaggtggtatttcaattacgtcaaaaggtgaatttttacacgatttgaccaaagaaaactttgaagctattcttcgaacacaattaatcacagaagtagaggaagaagaacactggtatcataagatttggaggaagaaacaatgaagaaatttttcaatagtcaattttggttggttattgtatccattgtcttttccattctcctatttttaacagccacatcaagtaattacacacggacaggttcgcaagtatcgggggcaacagaaacttatacccatactttggagaatgttcccattgatattaaatatgatactgataagtattttattagtggttattcttatgaaacagaggtttatctgacatcgattaatcgtgtcaaattggattctgagattaatagtgatacaagaagttttaaggtagtagctgatttgacaaacttgggtgaggggacacagaccgttcctttgcaagtgacagatttgccgtcaggggttacagcgacagcttcaccaagtagcatttcagtaacaatcggtaaaaagaaaacaaaaacatttgaagttcaaggtgaagtagattctagtcaattggctactggctatgagttgaaaaaagtttcgacaaatatttctgaagttgaagtcacaagttcagagtcaattattgaccaaattgaccatgtggttgctaaattgccagaaacagaagtattggacagtaattacagtggacgcgtagccttgcaggctgtggcagcagacggtacaatcttagctagcgctattaacccttcgaaagccaaattagaagtgaccgtgaaaaaattgacaaaaacagttccagtaactgtgaaaacaacaggagagatgagtgataaaatctctgacatttcatacaaattaagccaaagccaagtaacgatttctggtagtcaagatgctttggatgcggtggatgaagttgttgctaatgttgatatttctaatgtcacaaaagacacaagtgtcagcgtgaatttatcagcaaataatgtgactgttgacccttctgttgtgacagttcagttgacagtaacgaaaaaataatagataatagcaaagactatatattaatgaattaatgataatttaagatgaaaatgtgatttttataatgcaactattattttagattatcttaggaaatgaatttagtaatggaggaagcgatttttcgctagtagaataatgggaaaatattttggtacagatggtgttcgtggagaagcaaatgtcgaattgacacctgaattggcgtttaaattgggacgttttggtggctatgttcttagtcagcatgaaacaggacgtccaaaagtatttgtggcacgtgacacacgtatttcaggagaattgttagaatctgccttggttgctgggcttctttctgttgggattgaagtttacaagcttggtgttctagcaactccaggggtatcttacctagttcgtacagaaaaagcgagcgctggtgtcatgatttcagctagtcacaatcctgcattggataatgggattaaattcttcggtggcgatggttttaaattggctgatgaccaagaagacgaaatcgaagcattacttgacgctccagaagatacgcttccacgcccttcagctgaaggtttaggaacattagttgactatccagaaggacttcgtaaatacgaaaagtttcttgtttcaacaggtgttagcttggaagggatgaaagttgcccttgataccgctaacggagctgcttctgtatcagcgcgtgatgttttcttggatttggatgctgatattactgttatcggtgaaaaaccagacggtcttaatatcaatgatggcgttgggtcaactcacccagaacaattgcaagaattggttaaagaatctggcgcagcagttggtttggcattcgacggtgatagcgaccgtttgattgctgttgatgaaaatggcgacattgttgacggtgataaagtcatgtacattatcggcaaatatttatcagaacgtggacaattagctcacaacactatcgttacaacggttatgtcaaaccttggtttccacaaggcgcttgaccgtgaagggattaacaaagcgattacagcagttggtgaccgttacgttgttgaagaaatgcgtaaatctggttataaccttggtggtgaacaatcaggtcatgttatcatcatggactataacacaacaggtgatggccaattaacggctatccaattgacaaaagtgatgaaagaaactggtaaatcactttctgaattggctgccgaagttactatttacccacaaaaattagtgaatgttcgtgttgaaaatagcatgaagagcaaagccatggaagtaccagctatcgctgatattatcagcaaaatggaagctgaaatgaatggcaatggtcgtattttagtgcgtccaagtggtactgaaccgcttcttcgtgtcatggcagaagcaccaacagatgaagaagtaagctattacgtggataccattgctgacgttgttcgtaaagaaattggtattgactaaaatcattttcataaaaagaggagtaagggaaatgcgttttacctgctccttttctttcgtaataaagtcattggttatccttggcaaaaatgttataatagcgtcatgttaacaaaaccaacatcagcttatgttcatataccattttgtacgcagatttgttattattgtgatttttcaaaagtatttatcaaaaatcagcctgttgacgattatttgcaggctcttattcgtgaatttgagagttatgatattaaacaattgcggactttatatatcggaggtggaacgccaacctcaattaccgcgcagcaattggattatttgctgacgaatttgacaaagcatttagatttgagcgtattagaagaatttaccattgaagcaaatcctggggatttgacggatgacaagattgaagtgttgaagaaatctgctgttaatcgtgtgtcgcttggtgttcagacttttaatgataagcaattaaagagaattgggcgtagccacaatgaagcgcaaatttattcgacgattgaccatttgaaaacagcgggctttgataatatttcgattgatttaatttatgcgcttcctggtcagacaatggaagatgttaaggaaaatgttgctaaggcgatagtgctggatattcctcatttgagtttgtatagtttgattttagaacatcacacggttttcatgaataaaatgcgtcgtggaaaattgaatttgccccaagaggaccttgaggcggaaatgtttgagtacattattgctgaattggaagctaatggctttgagcattatgaaatttctaattttaccaagccaggttttgaaagtcgtcataatttgatgtactgggataatgcagaatattatggtgtcggtgctggggcgtctgggtatttaaacggtgttcgttatcgtaatcgtgggccgattcaacattatttaaaggctgtttctgaaggaaatgctaggttgtcagaggaagtcttgaccaaggacgaaatgatggaagaagaacttttcttgggcttgcgtaagaaatctggcgtttccattgcaaaatttgaagaaaagtttggcgtgtcttttgaagaacgttatggtcagattgtgacagaactttgtcagcaagggcttttggtaccagatgataaggtagttcgaatgactaaaaaaggtctctttttaggagacacggtagcagagagatttatattggagtaatgacatgggattaagttatcaagaaaattatcaagtacctttttacgaaagtgacattaatcacaacatgaaattgccgcaacttttatcgttagtgttgcaagtttcagggaaacagtcacttagtctggggatgagtgatgattatatttatcaaatgtacaatcttgtttggattatcacagagtatgcgattgaaatcgagcgtttgccaaaatatactgaaaatatcgtgattgaaacggtacctacggcttataataagctcttttgttaccgtgatttcaatgtttatggtgaatctggtgataaaatcatgacgattcattcgacttttgtccttatggattatgatagcagaaaggttcaccctgttattgatgaaatcgttgacgtttatgacgttgaaaagattaaaaaaatctatcgtggtcctcgttacgaaagcttggaaaatccagaagaaacaacttatcacgttcgcttttttgaccttgatttgaatggtcatgttaacaatagcaaataccttgaatggatgtatgatgtgttggacgtggcgtttttagaggaacacattccacaccacattaacctcaaatacgtgaaagaagtccattatgggcatgatattaaatcacgtgttgaaacagatggtttgataacaaaacatgaaattgttacccaaggtgctgttcatgcacaagctcgcatcgagtggaaggaaaaataatgattgttgatgataagaagtgggttgattggcttgttcgtttgcaatctttggcacaagcagggttagcttatggtcgcgataagtatgatattgaacgttttgaggaaattcgagagatttcagttgcaatgatggctgaattatcgcagttaccagctcagaaagtggctgatttgtttgctaacgaaacgggctatcaaaccccaaaaatcgatacacgcgcagctatttttcaagatgacaagattttactagtgcaagaagctaatggaaagtgggcgctgccaggtggttggtgtgatgttgaccaatctgtggcggaaaacacgcttaaagaggtgaaagaagaagctggacttgatgtgcaattggagcgcgtgattgctattcaagaccgtgaaaaacacaatcaaccagtttctgctcacaagatttgtaagattttttcattatgccatgccaaaggtgggcattttacaaagaatttagaaacgatagcaagtgggtattttgcgtgtgacaacctgcctgagcttgctaaatctaagacaacgaaagagcagattgcgatgtgctttactgcttattacgatgagaattggaaaacactaattgactaaggatagtcagagactttttagctagaagtctttttggtgttgtaaaaatggaggaaagaatgacttataaaggctatttgattgatttagatggaacaatttacaaagggaaaaatcgtattcctgctggagaacgttttattcaacgtctgcaagaacgcaatattccttatgttttggtgacgaataatacaacacgcacaccagaaaaagttcaagaaatgcttgcgacacaattcaatgtgcatacaccgcttgaaacgatttatacagcaacaatggcgacgattgattacatgaatgacatgaatcgtggaaaaacagtttatgtgattggtgaaacgggtttgaaaacagctattgctgaggctggctatgttgaagatactgaaaatccagcatatgtggttgtcggactagatacgcaactaacttatgaaatgcttgccgttgcaacgcttgccattcaaaaaggagcagtctttattggaacgaatcctgatttgaatatcccaacggagcgtgggttaatgccaggggctggttcgattaataaactcttggagactgcaacacgtgtgcagccagtctttattggcaaaccaaatgcgattatcatgaataaagctttggatgttctgggagttaaacgtgaagaagctatcatggttggtgataattatttaacagatattatggcaggaattcaaaatgatattgctactttgcttgtgacgactggtttcaccaaaccagaagaagtgcctacccttccagtgaaacctgaccatgtccttgctagcttagatgaatggaattttgatgaaaaataaactttggacgtttagcacttggctctggctccttgctctagctgtcttggtagctatttatggtgcttggctgatttaccctttggaagttgattggctcaaactaacccttcaggtcacgattacaaaagacgacctcttgaaaaactttaatattctgatgacctatctgaccaatccactttcacacaccctttctatgccagatttcccgtcatcaacagacgggctcaagcattttcgtgacgttaagcatttatttcacctagcgcaagctgtttttgtggtgatgctgtatccgtcttggcgtttttggaaaaatagcagagctgaaaaatcactttttctacatcaaagagcgtttactttagcagctgttttgcctgtgctaattgcagtagcaggattgctgattggctttgaccaattttttacgctatttcatgaagtgcttttccctggtgattcaacatggctgttcaacccagccacagacccaattatctgggttttaccagaggaatttttcttgcattgttttatcattttctttgtcacttacgaagctattatgattggcttgcttgtcattgctcgctgtcaattggctaaacgtctgcaagaccaacagaaacatccgaaaaccattaaggtagaaaggaacgattaagatgtcccttgcatggtattattggctattatttgccgtttcgtggctgtttgccattcttctttggattaaatcaacgactatccctcaaaaatggttgaaagccctctttgtgatttgtggcttaattgcctttgccctcccatttttctggggttggttggtgagttagtaaggagagactaaccagtccagtttttactaggagattatctattttgtccagttgtaaactgggctttttttatttagactgaaaatgtaaacgaatacatttttagaaggagcaaatatgtatcataagacgttagatgattttccgaaagagtttttatggggagcggcatcggctgcttatcaggtcgaaggtgcttgggatgcggatggtaaaggtccatcagtttgggatcaattttctaagattccaaataagacctttgaaggcactaatggagatgtggcagttgaccattatcaccgttacaaagaagatgttgctttaatgaagaaaatgggcttgaaagcttatcgtttcagtgtggcatggtcacgtgtcattccagacggtgatggtcaagtcaatcaagctggtttagctttttatgctaatttgattgatgaattgattagcaatggcattgagcctgttttgacgctttatcattgggatttgccacttgctttgcaagaacgctatggcggttgggaatcacgcaaaaccatcgatgcctttttgaaatattgtgatattttgttcacggcttttaaagataaagtgaaatattgggtgacctttaatgagcaaaatgttttcacgacgctaggttatcgtttggaagcacatccacctggagttcgtgatttaaaacgaatgtatgaagctaatcatattgttaatttggcgaatgcgaaagcaattgcgttttttcaccaaatggtgccaaatggtttgattggtccaagttttggttatggtcctatgtatccgttgacggcaaatccaacagacgtcttggcagctgaaaatggggaagccttgaataatagctggtggcttgatgtttattgtaaagggcaatatcctaaggttatttttaaacagttaaaagccttgggcttggcaccaacattggaggaaggcgacgaagagattttgaaattaggcaagccagattttgtcggaatcaattattatcatggcggaacagctaaagttaatggttttgaggatacagaagaagctgtcgctacggataaagactcgaatgtcacagatccttatttaatgcaaaataatcgcagcgaagaagcctcaccagaaaaagtcatgtttgcggttgttgacaatccttatttggaaaaaacggactggggttgggaaattgaccctgcagggttcagagtggctttgcgccgtatctatgaccgttatgacttgccagtttttgttactgaaaatggtctaggtgccattgatgaattaacggctaacggagaaattcatgacgattaccgtattcaatacctcgaaaaacacctgcttgagatgaaaaaggcaattactgacggtgttgaggttattggttactgtgcttggtcgtttaccgatttgttgagttggttgaatggttataaaaaacgttatgattttgtctatgttaatcgtgatgagtattctgaaaaagatttggcaagaattcctaaggatagtttttactggtatcaaaccgtcattgaaaccaatggttctgatatcaactagcggaggcttcagatgacacaatttcaaacgatattatttggtggggattacaatcctgagcaatggccaaaggaaatttggcaggaagatatgcgcttgtttgacttggctcatatcaattcaacgacaatcaatgtgttttcttgggcaacgattcaaccgtcagaaaatgagtatgattttgaacagttggacgagattgtcaatatgctggtagagcgtgattacaagattgtttttgccacctcgacggcggctttacctgcttggctttgtcgtcgttatccagaagtgacgcggacagattttgaaggacgtcatcatcattttagtcatcgtcataatgcatgtccaaatagcccagttttccaatattatgctaaaaaattagctggaaaattagcagagcgttacggtcatcttgacaatgttgtttgttggcatatttcaaatgaatatggcggtgaatgttattgtgataactgtgctagagcgtttcgcgtatggttgaaagcaaaatacggcacaattgaagcggtcaacaaagcatggaatatgcaattttgggggcatacgctgtatgactgggatgagattgtcctgcctaatgtgttaggtgaagccattggaactgaaaaaacagcttttgcagggctatcgcttgattatcgccgttttatgtcggattctattttgcaaaatttcaaagacgagcgtgatgcgattagagaatttgattcaaaaacacctgtcacaaccaatctaatgggaacttacaagccacttgattatttcaaatttgcgaaagaaatggacattgtttcgtgggataattaccctgcctatgatacgccagctagttttacagctatgacgcatgatttgatgcggggattaaaggctggacaaccttttatgctaatggaacagacacctagtcagcaaaattggcaaccgtataattccttgaagaagccaggtcaaatgcgaagcatgagctatcaagccatggcacatggagcggatacggttcaattcttccagcttcgtcgctcggttggcggttgtgaaaaattccatggagcggtgattgaccatgtgggacatgaacacactcgtgtttttagagaagttagtcagcttggagtggaactagctcaccttggcgaccaatttttaggagcaagaacacctgctaaagttggtattatctttgattggccaaattactggggcttagaatacgccagtggaccgacaaccgatttaaaatatgttgaccaaattcatcattactataaagaattgtaccgccgtcagatagatgttgatatggttagcttagagcaggatttcagccaatacgaccttttaattgcaccgtgtctatatatggtcaatcaagagcaaacgcgaaagattgaaaactttgtgcgaaagggtgggcattttgtcacaacgatgatgagtggtattgttgatgagacagataatgttcatttgggtggttatccaggaccgttaaaagatgtcttggggatttgggttgaagagtttgacgccttgccaccagaatatcgtgaaaatgtccaatttaagtcaggggaaagagcgaaagcacagctcttatgtgacgttattcatttgaatgacgcgcaggcattggcttattatgatagtcaggaattttataatagctatcctgtggtgacacaaaatcattttgaaaacggtaacgcttattatgttggcacaatgttagacgaagttggtttgtcagctttgtttgatagcattttgggaacactaggcattgaaagtcgggtattgccagacggattggaattaaaaacacgccgcaaaggtgataaaacatatcaattcttaatcaatcacacagctcaaacaatcccatgcgatttagcattgacaggctatgatttactaagtcaaaagcagatagaaaatatcacagaaattccagcatttgacgtgaaaatcattgtacagtaaaaaagaggtcaacgacctctttttagttatcatcatcaacttgtctttggagtgggaaaaggagtttaatcatggttccttgtccttttatgctgctaataaatagtccgtattgatcaccgtaatactgtttaatgcggttgtgaacgttttttagtccaatgtggctagtgtcttcaatgtcatttttagaaatgtcctcttgaatgcgtgcgagtttagcaggttcaatacctactccgttatcactcacgctaatgcaaagggtgttaggttcttgtaaggaaatggctagtgtcacaaaaccattttgagcgactgattctaaaccgtgtgaaatggcattttcaatcagcggctgaatcaaaagtggcaaaagataaatctcttttggattgagttcagggtcaatgatacagttgtaatggacacgttcgccaaaacgaagttgctgaatttgggtataaacttgaatagcatctaattcctcttgcaggctggtaatgcgttttccttgattggacaaggtgtaacgcattgattttgacagcaggcgaatggcattagcgacatcacggtctttgtgctgcagagctgtcatccgaatcgtttccaaggtgttaaataaaaaatgtggattaatctggctagctagaatgctaaatgccattttttgttgctggttgagcagttcttgctccgtgattttggattgataaatttcctcttcttttttcttgatgtgattgataatcttgtgaaaattaagcgaaatggttgaaatttcatcatgaccagcgatttcattgaagaaactataatcttcgatagaagcacggtaaacagtctcttgaagtttttggatacggcttgagaaaaatcgtgaaaaataaagcgtgagtataatggaaatgctcaaaatgaagatgagaatgcctgaccagcggagcccattttcaagaatggctgaaaaagcgttggtatcaaaagagtagatatacaccgtatccgaattggtaccatttgacaatggcagagcagtgtaggctaataatgtggtttggttgttattgttgtgaacataattggcggcaacttttgtgctgacactttcgttaatgctgatggctttcgtgctaacttcagaaaatttatcagaataaaaaatcgtatcttggttaagaaacatctgattgagataattggaattgttgattctattttttaaataattgtaatccattttgatttcaagaacagccatgttgttagacaaaggcatgggaattcgttgataaatggtcaaatattgaaagtcatcatcatcgtcaggaatggttagccagaaggcgctccattgctcactagccttttcataccaagcttcttttgccatgtcatcatgtgtcattgagatgaaatgttggtaatttggcaggcttgtgttatcactataaactaaaatgcttttgatagcggtatcttgcttgtaaacattattaagatattgataattatcaatggcttgagtggcactttcattatcagaatagttttcttctagcaggcttcgcagctggctatcattggtgagagcgtcggcgtattttttgaaattgctgcacgtgtcatggataatggagcgcgtgtgttgcgcatcttgagtggctaaactatgatagtttacgtttaattgccgtgttgagtcatacaccagataaccaccgatgataagcacagaagagaccagaataggtaagataatcaaacggagttgatgcttgattgaaaaatcattaatcgaatgcttaaaaaaatttattttcatatgttttatcgccattcaaattttttaaataatgataataggcaaaaagcagagcaataagcgcttaacgaagctccaaataagacaaggaaaatcttaaacgaactcataatcactcccaagcagagtaatgccacaggaatagaaagaatgataatggagtgccaaggggaagcaattgccaataaaaaactgttcttgagtgtctggtgtaagctgttttgatagcgcccgctaagtgcacagcaaatgataaatgcaacgataagaagcagaagaagtgctaaacaaatcacagcaaatatagttccgatagttgtttggactgaaaaccaaaacaagattaaaaagctaagcaaagctccagccagcaagaagataaaactaatcagaaatctattttttaaatcggattttaattgaataaggtagtcttttacgagataaccactcttgtcatcagcgtatcgtaaggtgacataaaacaaagaagaaagggcaggtccaatggttataattggaaaacacgttattagaaacaaaagattcaatgcgataaaattgcagatttcagttactgcttggaatagtcgattgttgtagtcaaatttcatggaactgcacctcttatctttctgtattcattatagcaaaaagcccaaatgaaagggcttaatttttagggaatgtctattttttacagtaaggtggtatagttttagctagtggcaaacggttgaaaagatgatattatcttttatgtaaacgattacaagagaggtgaaggttatgataaaacctagttcgcacaaatcaaaacagaccataagcgacaggcattcccgcgaagggaaagtgatgtttttaacggttctcccttttttgattttagtgtttctattttcttatttcccgctgcatggttggatttatgctttgtatgattacaagccagctctggggctgtcgggaagtgaatttgttggtttgaaatggttcaagatgattgtttctagcaagacccaattagaccaactggtacaagtaatgaaaaatacatttgccatgagtttcttgggcattgcgacatcattctttccagttttatttgccatttttctaaatgaaattaagagcaaatggtttaagaacatcgttcaaaccttgacaacattgccaaactttatcagttgggtgcttgtttacacgattgcttttagtttattttctagtactggtttggttaatacgttattagagcattatggcattattacagagcctgttaagttcctcgatagtgataaacatacttggttaatcatgtgtctgtggggcatttggaaaggactaggttggggagctatcatgtacttggctgcgattgctgggattgaccctgaattgtacgaatcagcacagattgacggtgctaaccgttttgatttaatgcgtcatattaccttgccagctcttatgccgacttacttggtaatgttgatgttgtctattgctaatttattaagtaatggtatggatcaatattttgtattccaaaacgcctttaacaaagaacatatccaagttttggatttatacgtttataatatcggtcttggtggtagtagtttatcatttgccacagcacttagtatgttgaagagtgttatcagtgtggttttattggcagttgttaatattgcttctaagaaaatccgtggcacaagtattgtttagggtggtagaaaaagatgaagaaaaaaggtcagttaacacgctcggatataacgtttaatatttgtaactatttattctttataatttttacatttatctgtttttatccattctattatttaattattaattcgattagtaacaatgaattaagtgccttgggagaaattcgtttcttaccaaaagaaattcattttgaaaattatattcaaattttaaaactgggtggtttgccaacggctgcagttgtttcagttgctaggactgtgattggtacagcagcgacggttttagcttcggctttcttgggatttatgttcacccaagagcagttttggaaaaaagcattttggtaccgctttattatcatcacaatgtactttaatgcaggtatgattccaatgtttatcactatgaaaacgttgggattgaccaataatttttgggtatatgtgttgccagccgttgttcagccatttaacattattttggttaagacttatatcgaatcaattccaaaatcattgcaagaagcagctgaaattgatggggcaaatattttacaagttttctttaaagtcattttgccaaactgtactccaattttagcaacggtagcgattttctcagcagttggtcaatggaattctttccaagataccttgatttacattactgaccagaagctatactctctgcaatatttgctttatacttatattaatcaagctaatagcttagcgcaaatggtgaaaaatacaggtggagcagttggtagtgtggtttctgcggcaacgactcaaacaccaacatcaattcgcatgacggtttctgttgtcgtggttttgccgattatgtttatttacccaatgttccaaaaatactttgtaaaagggattatgttgggtgctgtaaaaggttaatgattttcaattggtatgcaaaattggttaacagccaatgtaatataaaataaggagaattttaatgaaaaaaagttggaaaaagcttgtggcattaggaattattgcaacttcttctttggcattattgtcagcatgtagcagtaaaaaaacggctagcgtagatagaagcgaaaccattactgttgatgtttatgatgatgttgccaactacatgggaatccaaaaagggtggtttgcacaacttgtcaaagataaatttaacatcgaattaaacattatcgcaccaaacgttgctggaaatggtgatacgctttaccaaacacgaacagccgcaggtgatttgggtgatattattatcacaggtagtggtgagcattacaatgaattggtgcaagctggcttgctttacgattcaacagagctctacaaaaaaatggacaatgtcaaagaatatgatgcagctgttcaacatttaaatagtgatgggactatttatggtttcccaacagaagtttcaagtacttccccaacggagccttcagaagctcaagacccaaccttcggaacttatttgcgctgggatttgtatgggaaagttggttacccacaagtcaatacgcttgaagatttgttgccagttttagcggccatgcaagaagccaacccaacatctgattcaggcaaaaaagtctatgccttctcactctttggcgattgggacggcaatatgatgggagctgcgaaacaattggctgcgctttatggttatgatgaattaggctttgttttagccaaagcagatggctctgattatcaaagtatcattgatagtgattcacaatatgtgcgtgctttgaaattctactttgaagctaatcaactaggacttgttgacccagaatcaacaacacaaaactacgacaccctttattcaaaattccaagacggacaagttctcttctcatggtggccttggcttggacaagcagcctataacacaactgacaatttaaatgcaggtaaaggctttatgtcagttcctattaaagaccaaaaaatcttctcatatggtgcttatgcttatggtggtaaacaattcattggtatcggctctaatgccaaagacccagaacgcattgctgaatttattgactggttgtattcaccagaaggtgaacgtgccaacagttcatcaagtcaaggtagtgcaggtatcgaaggcttgacatgggatattaacgatgacgggctaccagaattgacagacttcgggaaatcagccctcttgtctagcgacggtgcagaagtgcctgaagaatacggtagtggttcatacagcgacggtctttcaacattgaacgttgacacaatcattccaattgatattgacccagataccaatagtccatattacttcactttgtgggatacttaccaacaagaatacaacacaaatcctgtcattactgactggagctcacatatggacaatgccgaaacaaccattgactatcttgaaaagaatgaccaacttcttgttgcaccaggagcaagttaccttgcgcctgaagatgactctgaaatcgaaactcttcgaaatcaagtgaaatcaacggtggttgaatattcttggaaaatggtatttgccaaagatgaagcagaattcaactcattgttaaaagaaatgcaagatacagctaaaggtttgaattacgacaaagtgttagcgattgatatgcaaaatgcaaaagaccaacaaaaagcgcgtgaagaagtcgtcaaagaagccaaagctgatgataacaattaatgtctagttgcgggtggggtgggaccttggtctcactccattttttgacttgtgaggagaaaacatgagcattaccattgaagaaatcaaacgtattgccaatcaaggaccatatttaccaacgtggaaatctctgtttcagtaccaagtgccagagtggtttttaaaggctaaatttggaattttcattcattggggcgtgtatagtgttcctgcttatcgcaacgaatggtattcaaggaatatgtacatcacatcacacccagaatttcagcaccatgtcaaaacttacggcgagcataaaacgtttggttataaagatttcattcctatgtttaccgctgaaaaatttaatgcaaaagagtggttagcaatttttgaaaaatctggtgcgaaatatatttttcctgttgctgaacaccatgacggttttcagatgtaccaaagtgccttatcaccatttaatgctgttgaaatgggaccaaaacgcgatattcttggagaattaaaaaaggaagctgagaaacgagggattcatttttgtacctcatcgcaccgcgccgagcattattttttcttcggacatggtaaggaatttgagagtgatattgttgcccctttaacaaaagatagcctttattggccagccatgcctgaacctgaccaccaagatttatttagtaagccttacccagaccaagcttttttagaggattggctgctgcgaacggcagaattaatcagagattaccaaccagaaatactttattttgattggtggattgagcacgacagtttcaaagactatctaaaactaattgctgcttattattataatttaggtgtcaagtggcaaaagccaactagtatttgctataaacatgatgccatgatgtttgggactggcattgttgaaatggaacgaggtggttttgaacaagcgcagccattttcttggcagacagacacggctatcgctcgcaattcgtggtgctatacggacagtttggcatacaaaacacctttagaaatcattcaaaccttgattgatgttgttgctaaaaatggcaatttactgcttaatgtaggaccaaaagctgacggaagcattgcgaaacatgaccaagatattttagaaaccattgggaattggctgtctattaatggggaggcgatttatggtgcaaaagtgtggcggaaagcccaagaaggaccaactcgtcaaccgagcggtcaattttcagacgctcaacaagtccattatacgagcgaggatttccgctttaccgcttgcggtgatgcgatttatgtctttgctatgggtgacttgcaagaccaaaatcagataactgtaaaatcactagcagacataaaaaatcaaaatattccagaatttcatggtatcatagaatcagtgactttactcggctacgcacaagaactcacatgggtaaaagacaaaaaggggcttcatattcgtattcccaagctaaaaagtggacttccacaagtctttaaagtgagaataaagtaagccgttgtgaagcaacatcgaggatgactttatgaaaaattggaaaaggaagggttaatcaatgaaaaaagtattgattgttgatgacgaaaaaattatcagagagggattgaaatacttaattgattgggaaaattatggcttttctgttgttgccatggcaagtaatggtaaggaaggtttgcaggcgattgagacttatcacccagatttggttatcacagacatcaaaatgcctgaacaaacgggtcttgaaatggttcaaacagccaaagaacgccttgactatcctttttattccattattttatcagggtattcggaatttgaatatgctcaacaggcggtgtcgctaggtttcacgtcatatttgttaaaaccagttgatgaggacgaactgattgctgtattgaaaactatccaagaagaaacagccaagcttgatgaaaatgattttgaaaaacgtttgtttgataagattttcggtactgacaagacaggcttgacagattatcaatttatcaactgctcacgctttgaccaagctattccagttgatattttggaacaactagaggtgcttcctctgaaatatgtcgtgttgaacaatctctcaaaatattaccttattttgctgacaactgcgccgctaaatcaagacgtttatcaatttaccaaaatctgtgcaaatcgcgggaaaattatcagcacaggctgggtgagtgccaagcaagatttgacagtcattccaaaacagttaaacgatttatccgaagcagcatttatgtttccaaatcagttgattttacctgaaaaaatcacgagaatgtcaccagaaatcatgattccagtcactttagatgacctcgtatcaaaaattattgccactaatgatttgacgacagtcgttatggcttacggtcgtagtctttgcgcagattattacctaaaagatgaccttatttggaaaatgcgtcacgattatgcaacgattcttgataagattaaggaaaaattgcaaaaatcaatcgctgtcgatgaaagtgcgttttatgagaaagctagacaagcagattcttaccccgaattaatcactttatttaaggaagaacttgaaaagctatcccgtcagattgcggaagaatttaacaatattgatattattgaccaattgatttattacgttgaccgtcattacgaggaagatttgactttgaaagatatcgcagaccattttggctacaatagcgcctatctcggtaaaaaattcaagcgaaaaatagacgaatcatttttgaattaccttgaaaaagttcgtatggaaaaagctacggatttattgaaagaatctcacttaatggtttatgaaatcgcagacaaagtcggctataacaatattgattatttctacaaaaaatttaaacacttttaccatatttccccaaacgaatatcgcaggcaaattgctcaaaaatcaaaatagactaaaaatgccagtaagaatatctaatcttgctggtatttttgtagcgtatttttgtctataatgagaattaagaaaacgctatcacaggaggtggcagatgccgtatttttgtatagatgtgggtggtaccatgatcaaatatgctttgcttgacgaacacgaagcagtccttgaacatgacgaaatcccaacacaaaaagaaagtaaagaagcctttattcactcacttagcaagctcatcaatccttacctgaaatcttttgagattaaaggaattgggattagttttcctgggcacattgtaccagaaactggcgtcgccttgcaggcaggagcaatcggtgttttaagtggctgtaatgtcattgacttagtacgacaagaattaagtcagccagatattccaataattatcgaaaatgatgccaattgtgcagcaatcgctgaagcttattcgggtcgtggacaagattgtgatgatttttgcttgattaccattggaacgggcattggcggtgcttttgtccatgataaaaaagtggttcatgggcatttttacaaagcaggtgagcttgggatgatgattatcgattaccaagaaagtggttatcaaaccttgcatgacctcgcttcaaccagcgctcttgtcaagcaatataaagtcttaaaaggattgcctagtgaagaaactgttcatggcgcagctatttttgaagataatgacctagctgtcaaaagacttatccaagaatggtcaaccagattagccataacgatttttaatgtggtttgtcaaaatgacccagacaaggtgcttttgggtggaggcatcagccgcaatccacatttattgccttatattttgctagctctggcaaaaaatcctttctgggagacctttgaagtgccaatcgaaatttgtcaacatcaaaacttagcaggattgcttggtgcttatcatttgttaaaagaaaaaggagaatagatacgatgaaatttttaaacggtggctggctagtcaaagacggctacgaagtcaaatacgccacacatctgtacgattaccgtattgagcccaatcgtctaacgttttacatgccatattcttatgtcgctcacaagggcgcaacgcttgacggtggtttaatgaccatggaaatttttacgccgcgagaagagattatcggtgtgaagatttacaatcataaagggcaagtcaaaaaagcaccgcagtttgaattatcaacagaaaaagtagcacctcagatttttgataacgaagaacagctaactttgacttctggcaatttaagcatttcaatcagcaaaggtgagcaactgacagtcaaatttgcttataagggaaaagtcatcgcgcaaagcttaccacgtagtaaggcttatattactgatgataagaaagtcgctcatgtcagcgaacaattaacgattgatgtcggtgagaaaatttatgggctcggtgagcgtttcacaaattttgtcaaaaatggacaaacggtcgatatttggaacgaagacggcggaacaggaactgagcaagcctataaaaacattccattttatgtcagcaataaaggttacggtgtttttgtcaattcatctgataaagtcagttttgaagttggcagcgagaaagtctcacgtgtccaattttcagtccctggagaaagtctggagtactatgtcatcgctggagatagcatgaaagacgtcttaggacactatactgatttgactgggaaaccaagtttaccaccagcttggacatttgggctgtggttgagcacatcatttttaacagattatgatgaagcaacagttaattctttcgtggatggcatgattgaacgtgatattccactagaagttttccattttgattgtctctggatgaaagaatacgaatggtgtaactttgaatgggatgaccgtactttcccagaccctgtcaatatgctcaaacgtcttaaggaaaaaggcttgaaaatctgtgtttggattaacccttatatcggacaaaaatctcctttatttgatgaaggggctgagcatggctattttctgaagaaagcaaatggtgatatttggcaatgggataaatggcaagcaggaatggcaattgttgattttaccaatcctgaagcacgccaatggtatgaagcaaaattgaaaaatctcctagatatgggtgttgattgctttaagaccgattttggggaacgtattccaacagatgccgtttattataaccatgctgatcctgctaaaatgcacaattattatgcgtatctctacaacgaagtggtgtttaacttgctcaaacgtgaacgtggtgataaggaagcggttgtctttgcgcgttcggcttctgtcggttctcaaaaattcccagtccattggggcggtgatagcacatcagattatccttcaatggcggaatcacttcgagcaggtttgtcatttggtttaggtggttttggttactggagccatgatatttcagggtttgaagcaggagctaatcctgatttgtataaacgttggacacaatttggcttactatcatcacatagtcgttatcacggtagttgggagtataaagtgccatggctctacggtgacgaagctgttgatgtcacacgagcctttacaaaattgaagctatcattaatgccatatttgcaaaaagaagctgtccaaacctcacaatcaggtgttccaatgatgcgtgccatggttttggaatttccaaaagacctagcaacgcatgaccttgaccaacaatatatgcttggtgagtcattactggtcgcaccgattttcaatgacaaagggcaaaaagatttttacgtaccaaatgctggcggcgcgtggattgacctcttgacggataaagcctatccagcaggacattggtatcaagaaaattttgattatttccacctcccagtccttgtccgaccaaatagcattttggtgagaaaagaagctgccaacagagcagaatatgagtataaccaacaagtcaccgttcatgtctataacctagaggacggaaaaacagcacaaacagctatttttgacacccaaggtcaaaaagcagcaactattaagattagcagaaaaggaggtgattaccacctagaaacaacaggtctcatcgattcactcctccacatccattatatcgatgacgacaaagtaaaacactacaaaatagcgcttaaagataatccccaaacaatcactttaaacgcttaaaatctcctctttttccctccttttaaacagaaaacaagcgcttgaaaacgcttgtttttttatattttaaagagtaaaataaaattacttagttttgttgagtcaatagcaagcaaaataccatgaaacttactaaaattttagtgaaaacacctttcaatatttttcaaaagttttcttttatggtaaaataaaaactgaatttatttagataggttggattgtttacatggaaaaaactttctttatgattaaaccagatggcgtgaaacgcgggcttgttggggaggtgcttcaccgtattgaacgacgtggttttacaattgaaaaattggagatgcgcatggcaaccccagaattattagaaaaacattatgctgatttggttgaccgcccatttttcccactaatcgttgattttatgacaagtggtccagtaattactggcgttatgtctgggaatgaagttattacttcttggcgcacaatgatgggagcaacaaaccctaaagaagcacttccaggaacaatccgtggtgattttgcacaagcaccagacgaaggtggtgcaacatttaatattgttcacggttcagactcaccagaatcagtcgaacgtgaaattgccctttggtttggggaataaaataataaaaggaaccatttgaggctgaagtctagctgagacgaatggcgcgattacgaaatcttgtgagaaaaattggtccacgaggttttagagctgtgttgtttcgaatggttccaaaactgaatttgatggctatattgatgccgatatgttttagagctgtgttgtttcgaatggttccaaaactgtgtccgcgttggatagttcgacggttaggttttagagctgtgttgtttcgaatggttccaaaacaaacagttgtaaaatgtacgccgatttgttgttttagagctgtgttgtttcgaatggttccaaaactctaacattaatcattgtcattcgagttgagttttagcgctgtgctgtttattttagcatcttatgatgcttttttcttttcttgaaatgacttctaaaactttttatagcaacgtttctgtttatctgttataatagaaataatgattaattgtataggattgtaagatggatattcaagaattaaaaaaacgacaagagaagattcgtaatttctctatcattgcacatattgaccacgggaagtcaactttggctgaccgtattttggaaaaaacagagacggtttctagtcgtgaaatgcaagctcaactcttggatagcatggatttggagcgtgagcgtggtatcacgattaagcttaatgcgattgagttgaactacacggctaaagacggtgaaacctacattttccacttgattgacaccccaggacacgttgacttttcatatgaagtgtcacgttctttggcggcttgtgagggggcaattttggttgtcgatgcggcacaaggtatcgaagctcaaacccttgccaatgtttacctagcccttgataatgatttggaaattctgccagttatcaataaaattgatttgccagcagcagatccagagcgtgtgcgtcaagaaatcgaagatgtgattggtcttgatgcttcagaggctgtgcttgcttcagcaaaagcaggtatcgggattgaagaaatccttgaacaaattgttgagtacgtgccagcgccagcaggagatgttgaagcaccgcttcaagcgcttatctttgactctgtttatgatgcttaccgcggggttattctgcaagttcgtatcgttaatggtatggtaaaacctggtgataagattcaattgatgtcaaatggtaaaacgtttgatgttacagaagttggtatcttcacgccgaaagctgttggacgtgatttcttagcaactggtgatgttggttatatcgcagcgtcaatcaagacagttgctgatacccgtgtgggtgatacagtaactcttgctgaaaatccagcagaagcaccgcttcatggttacaaacaaatgaacccaatggtatttgctggtctttacccaatcgaatcaaataaatacaatgacctccgtgaagcacttgaaaaattgcaattgaacgatgctagtctccaattcgagcctgaaacatcacaagctcttggctttggtttccgttgtggtttccttggtttgcttcacatggacgttatccaagaacgtttggaacgtgaattcaacattgatttgattatgacagcgccatccgttgtttaccatgttaacacgactgacggcgaaatgcttgaggtgtcaaatccgtctgaattcccagacccaactaaggttgcaagtatcgaagaaccatatgtgaaagcacaaatcatggttccgcaagaatttgtcggagcagttatggaacttgcccaacgcaaacgtggcgactttgtgacaatggattacattgatgaaaatcgtgtcaatgtcatttaccagattccgcttgctgaaattgtctttgatttctttgataaattgaaatcatcaacacgtggttatgcaagttttgattacgaaatttcagaataccgtaaatcaaaattggttaaaatggatattctccttaacggtgataaagttgatgcgctcagcttcattgttcacaacgaatttgcttatgaacgtggtaaattaatcgttgaaaaactcaagaaaatcattccacgtcaacaattcgaagtgccaattcaagcagctatcggtcaaaaaatcgttgcacgctcagatatcaaagcccttcgtaaaaacgtgcttgctaaatgttatggtggtgacgtttctcgtaaacgtaaattgcttgaaaaacaaaaagcaggtaaaaaacgtatgaaagctatcggttctgttgaagtgccacaagaagccttcttgtcagtgctttcaatggatgacgataacagtaaaaaataaaacgattaaacagctgaaagtttttctttcagttgtttttttgagaaattttaatgcttcgagctaaagtgagaaagaggttttggggtgaaatgtctttgttttgagatagtttcataatgaatttgcaagtttttgttaagagtaattttagagaactgttcaaattttcagttattttatggtacaatagaattaaaactataccatgggagagttgtatgaaattactgacaaatgtgtcacaattaaaaggaactttgcgagttcctggagataagtcaatcagtcaccgttcaattatgttcggcagtcttgccaagggaacaacaactgttcatgatattttgcgtggtgaagatgtgctgtcaacaatgcaagtatttcgtgatttaggggttgatatccaagacgacggtaacatcgtaaccattacaggtgttggctttgacgggcttaaggctccaaaaaacaaattagatatgggaaattcaggaacatcaatccgcttgatttctggcgttttagcagggcaagattttacggttgaaatgtttggtgatgacagtttgtcaaaacgcccaatggaccgcgtgacaattccgcttcgtcaaatgggagttgaagtgtcagggcaaacagaccgtgatttgccaccgcttactatgcgtggtagcaaagcgcttaaaccgattcattatcaacttcctgtggcgtctgctcaagtgaagtcagcactcatttttgcagctttgcaagctgacggtgagtctgtcatcattgaaaaagaaaaaacacgcaatcacacagaagatatgattgttcagtttggtggcgcaattgatgtcaatggcaaagaaattcgcatcaaaggtggtcaagaatttactggtcaagatgtggttgtcccaggtgatatttcatcagcggctttctggttagtcgcagggcttattgttccaaatgctaaagtaacccttgaaaatgtcggtatcaatgaaacacgtactggtatcattgatgttatcaaggaaatgggtggcaaaatgaccatttcaaacgttgatgagattgctaaatcagcaacgattaccgttgaaacatctgaacttcacggcgttgaaattggtggcgaaatcattccgcgtttgattgatgaattgccaattatcgctcttcttgccacacaagctaatggtacaacgattattcgtgatgcagaagagttgaaagtaaaggaaacagaccgtattcaggtggttgcggatgctcttaatgcaatgggtgctgacattacgccaacagatgacggcatgattatcaaaggaaagacaccgctccatggcgctaaagtcaatactttcggtgaccaccgtatcggtatgatgactgccattgctgcgcttttggtgtcagacggagatgttgaactagaacgagcagaagcgattaatacaagctacccaagcttctttaatgatttggaggtactctcacgtggctagaattattattggttttatggggtctgggaaatcaacgatttcatcattgttagatgaaaattacattgatatggatgctttgattacagagcgtatcggcatgtcaatcgcagactttttcgctaaagagggtgaagctaaattccgtgaaattgagtcacaagtgcttgcggaattggctgattctgatcaagtcatttcaactggtggcggcgttgtcatcaatccgattaatagagagattttagcaaaaaatccagaaacgatttacctaaaatcagactttgaaacgctttatgaccgcattgagcatgatacagaaaatgttcgtcctttgtttgtcaacaacagcaaggaagctttcaaagaaatctttgacggtcgccaagaaatgtatgaagcagcagctaatcgtattattgacgtggctggtaaaacgcctgaagaaattgttgaggaaatcggatgaaagttggctatttaggaccaagtggttcttttacgcataatgttgctgttaaggcatttccagaagctaatcgcatgccttttgcaaatatcaccgaagttatcaaatcttatgaagaaggttttgtggattatgccattatccctgttgaaaattcaatcgagggttcggtgcatgaaacgttggattacctttttcatcaagctgaaattgaggcgattgcagaaatcattcaaccgattaaacaacagcttttagcaacaacacaaacaaagaaaattgaaaagattttttcacacccgcaagctattgctcaagggaaaaaatacattaaagcacattatccagcagcaaaaattgagatgacggctagtacggcttacgccgcacgtttcattgctgaacatccagaggaaaactttgctgccattgcgccagtagctgccgcaaaagaatatggtttggaaattattgcccaagatattcaagaaatggatgaaaactacacgcgcttttgggtactagggcatcaaaaatggtcgtttgatttggcaaaactcaatcaaaaagtttcattggcattgaccttgccagataacttgcctggtgcgctttataaagcattatctgtttttgcttggcgtggcattgatttgactaaaattgaaagtcgccctctaaaaacagctttgggagaatattttttcatcgttgatgttgaaaataaaaatgatacactagtgtcatttgcactagaagaattgagtgttcttggtattggctataaaatcctcggacgttatgatgtttacaaactataaaatcctctgatttttggtatttaggaattgttaagcgcttgtgcttgctctagtctgatgaaaatgggaaagatatggtatgagatatggcaagaagtaatttaagtcggcacgaagaattaagatacgaatacctcttgagtaatcttgagtatttgagtgcgcgcgaaaaacaagaatttgactatctttacaataaaaaacaagctggtgaggtcaacgagccaccacgctctcagccgtcgtctgcctataatgacaattactacgatgattattatgacgatgcttatgataatcaagtggattattatgatgacgataactggacctcgcaagggcttcccaaatacccagaagaaaaaaagcagtcgaaacgttcctttagaaggacgagcgagcagcaggcagagattcttccaacttatcaagacaattatgagaattatgatgaggcattttatcaagaacccgaacctgtaacgcctaaaaaagcaaagaaacctaaaaagaagcgtcgcagaattcgtattaagcgtctgttgaaacttcttggtttcttggtgattcttgtcatggcagggatgatttacatgtttttcaaaggtgttaatgatgtttcaagtggtgagacaaattacacagcagccgtaacagaaacattcaatggggaagatagcgatgacggtactaatattctcattttaggaagtgaccagcggattacgcaagggtcttcggatgcccgaaccgatacgattatggtgatgaatattggcaacagcgacggaaaaattaaattagtcagctttatgcgtgataccttggtcaatattgacggtgtcagctacaatgcttattcaaatgaccaaaaattgaatgtcgcatttaatattggtgaacaagatgacaaccaaggggcagaactcatgcgccagacgttgaaagataattttgatattaatatcaaatattatgtcatggttgactttgaaacctttgcagaagccattgataccttgttcccaaatggtgttgaaatagacgccaaatttggcacggttgacggtcaagcagtttcgtctgttgaagttcctgatgacctcaatatgcaggctgacggtactgttccaaatcaaacgattgaagttggaacacaaaaaatggatggtcgtaccttgctcaattatgcccgtttccgtaaagatgatgacggtgactatggtcggacacagcgccagcaacaagttatttctgccattatcaaccagattaaagacccgtcaaaactctttacaggctcagctgcaattggtaaaatctatgctttgacctcgacgaacatttcctatccatttctcctaaaagagggcttatctgttatcacgagcggtcaagaaggtatcgagcaaacaaccattccagccgaaggtgactggacagatgactacgatatgtatggcggcttaggaattgccattgattttgataaatatcaagaagagttaaaagaacttggcttgcggtagatataaaaaaatattgaccaacatcttttaatcaattagttatagaataaaatgcattagtttcactagtgcgttttattatgcacttaaagttattatttgtaattactgtaatgttttgatataatgacgctaataaaatgagcgaggaatgacatatgattgttaagtcaagaaaacaaggcaattctttaatgattacaatccctagctatcttaatgttccagaggggacagagtatgaagtgaaagcttctgcaaatggggagttgattttttcaccagttgaaaaatcaaaaagagaatttgcaacaaatgaggacatatcagctataacagatgatatttttaaagactatgatgatgtttttaaagagttggtagataaatgacaaaatatttgacagaagaacaactcgtttccattaataaaatggtaatagaaaaatattctcctttagaaaattcaagacttgttagcccgtctgctttaaatatgattgtaaatttgcctgaacaatatgtttttggaaaagagttatatccaacattaatggaaaaagcgacggttttatttgttcagttgattaaaaaacatgtttttgagaatgctaacaaaagaacagcagtattcgctttagttgcttttttaaagttgaaccaaataaaattaatggtgagtacgaaggaattggttgattttacggttttgatagccactaatccattaacagatgatagctttaaagagtattgtgaatggttaaatgagcgagttgattgataagaaatctatcaactgctaaaacgagagataacgtctaaatgcatgtttatgtgaaatagaaaagttgaaaggtacgtcttgtaaatatgatataatagagaggcagttaagcttctctatttttattatagggaaaaggaccgagaaatagaacattgccaatttagaattggctgaaaggaaattatgttaagtaaaaatgctattgtagatgctgaaatcacggatttatcacatgaaggagcaggtgttgccaaggttgacggtttcgttttttttgttgaaaatgcacttccaggtgagaaaatcaaaatgcgcgtcttgaaagtgaaaaagaacatcggatttggtaaagttgaggagtatgtgacaatctctgaacaccgcaatcaagatttgaatgtggattatttgcgtacaggaattgcggattttgggcatcttgcatatgctgaacagttaaaatttaaacgcaagcaagtaatggataatctctataaaacagctggtatttcagatattgaggtgtcagaaacacttggtatggcgcacccatacgcttaccgaaataaagcacaagtgccagttcgtcgtgttaatggtcagttggagacaggatttttccgtaaacattcgcatgatttgatgccgatttctgattattatattcaaaacaaagaaatcgaccgtttgattaattttacccgtgatttgcttcgccgttttgaccttaaaccttatgatgaaaaagagcaaactggattgattcgtaatttggttgttcgtcgtgggcattattctggtgaaatgatgctggtctttgtgacaacacgcccaaaaatcttccgtattgagcaaatcattgaaaaaattgtggcagaatttccagcggttaaatcaatcgttcaaaatattaacgataaaaataccaatgtgatttttggtaatgagtttaagacattgtatggtaaagatacgattattgacagcatgcttggcaatcaatatgaaatttctgctcgttcattctaccaagtcaatactgaaatggctgaaagactttatcaaactgccattgatttttcagacttgacgcctgaagatattgtcattgatgcttactctggtattggaacaattgggctttcatttgccaaaaatgttaaagctgtttacggcgtcgaagtgattgaagaagctgttgaagatgccaaaagaaatgctgcgctaaacggtattaccaatgcgcattatgtcgctgactcggcagaacatgctatggcaacttggaacaaagacggtatcaaaccaagtgtgattttggttgacccaccacgcaaaggcttgacagaaaactttatcaaagccagcgttgccatgcagccagaaaaaatcacttatatctcatgtaacccagcaaccatggcgcgtgacatcaagctctatcaagaactcggctacaaactcataaaagtacaaccagttgatttgttcccgaatacgcatcacgttgaggcagtatcactgcttgtacgagctgatgaaacagcgaagtagaagcagatgttctgcccatgcgatagctgtcgtagaatgaggagttaacgacgaaatgagacggtaacagcgaaccgttgagtgtgttagcttgttagttaaaaacgcagaataagtgttcagattgcatttgaattttaaggcaagttgtttatgaagatttttaagatttatgaaggggaattttatgggactacttgattttttcaagaaaaagaagaggttgacttctagtgatgttttagatgatgaaagttacattaaagagattcgtcattgtagtcaagaagcttggcatcagtatgacgttttgttagctgctcgtggttatggttggaaaggcatggttgattgggctagttatatgagcaaggctgatttaatgaatatttctaccattacttacagttcactacctggttctaaagagattgaatgtatcgaaagttttcgtcagaatgaaaatgatttttttaaaatgcaagagttgaaagatgaacaatcaagtttggcagtcggtggagaaagtaaaaccttaaaagtaccaataaaaatcgtttggtttaatcaaacaaggacattaagattttttacgttgtttcttgatgatgaaaaacttatggagcgctacattgaaacaatgattcgtagaacatttttaactgcggacgctatgaaattagctaaaagtggcagaattgattaggaagtctgtttcaaaattttaaaaatacaatgaaactcaaagaaataattgatgatactgagaaacaagatataacacgttttattttagaagctttgcctgaatggtttgggatttctgaagcgcgtgagaactacatcaaagaaagtgcaaagtgcccatttatagctgcttatgataaaaaacacccagttggttttgtttatttgaaagaaactggaagagatacagttgagctatttgtaatgggagttttgaaagaatatcaccgacagggtgttggaaaagctcttgttttgaaagctaaagagattgctaccgaaaaaggttacactttttttcaagtcaaaacggttcaaatgggaaaatacgatagttatgatagcacaaatcgtttctatctttcacttggttttaaggaatttgaagtgtttccgacattgtgggatgactgcaacccatgtcaaatatatgtcatggcgttagagtgatgctattgataatgtaaaagggagtgattattatgagtaagggatattcacgaaaagaagtgcaacggtatttattatggacatttgcattagcatggctaatgcagatagttgttgctattgtttatcatatgggaaacacgctgtttgtgcagttattgctttctataatgatgttcacacctttgttaggagtgctgttaacaaaacatcatttaaaaggtttggggtggaaatttcaattcaaaggaaatgtcaaagtattcttgattacttggtttgctccattgcttttaatggttttgggtgcgatactttattttatgattttcccaaaacagtttgatttgagtggtcagtattatgcggcttcttataatggaaaagaggctcttgctcagctgcaagcaaaaggaatcagctatcctctcttagttttgataaatacttttgcttgtataacctatgctccagtgataaatgccatgttagcgattggtgaggaagttggttggcgaggtttcttgtatcctcaattgaaagcaaaatatggaaaaaataagggcagattatttggaggtattatttggggaatctggcattggccaattatcggactaatcggttatgaatatggtactgactatccaggttttccgattgtaggaatgctgattttctgtatttttacggttacctcaggcgtattatgtgactgggtttatgaaaagagtaaatcaatttggtttccagcaatttgccatggtgctattaatgccgttacgctccttcctttaatggtttgtgttgtgaacacaggagcgatgactttgcttggtccagctcttattggaatagtatctggaatacctctgtttatccttgctatgtttctgtttttcaaatcaaagcaaaactagttaacttcgttttctaggttaaggcgcattagtcgttttaccgttaaataaatatatttaaagaaaggtttagtaaaacattggaacaatttatgatagtgctgacgcagattgggatttttttgattttaatttgtgtgggcgtgttggctgtaaaattaaggatattagaagaagcgtcattagcaggtgtttctggacttgttatgaaaatcgcgcttccgtgttatatttttattaatgctgtgacgagtgcgaccagacagtcgctgatgcagagtttgattattgtccctgtcggcattgcactttatatcgctttggtgcttgtcaatatctgtattgaaaaagtatttggcttaaaaggcaatcgtcagaagatttacagagcatcttttgtctttgggaatattggtttcatgggaattccgctagttgcggctatttatccagatacagcaattttgtacgtgtcagtctttaccattgtcgatcaattattcttttggacatacggagtgaccttaacacagccagccagtcaagcaaaagaaggcttttctttggcaacgctaaaaaatctggtctctccaccacttgtcgctattgtcttagccgtcattttcatagtagtgggaattcccgttccaactattgctgaatccgttcttaacaccattggaagcacatcaatgccacttgcccttatttatattggtggtgttctttgctcagcaaatctaaaaccagtcctcaagtgtggtgaattatacgctggtattatcgttaaaatgattgctattccagttgttgctttctttgtcatggcacaactaggattgccagaggacatgtcagctaccattgcctatatggctgcgctaccaggaattgaactcgtgccaatgctcgctgaagccaatgggtctgacggtgattatgccgtctgtgcaatcatgatgacaacaatcgcctgcctaatcaccttacctatcgtaagtttgctaatggcgattctataacaaacacacctgtcgttcattgtaacggcaggttttttatgttaaaataccattaccataatattctgataatttaaaggaaaatgtgcatgaaccaagcgtatttagaagcaacaaagtatgttgattatgaccatccaaagattcaacaacaagcacgtcagttgaaaaaggagagtagtgacgagattgacttggtaaaaaacacctttcagtttgtgcgagataagatttcacattcatgggatgttcaagatagcagagtgacagtatcggctagtgattgtctgcgcgagggtgtcggtatttgttgggcaaaagccaatcttttagcagctctccttcgtgcgaatgggattccgtcaggcttttcttatcagcgcttgatacttggctcgactccagacacgggctattgcattcacgcccttaataccgcttatcttgattctttaggaaaatggctgcgcttagatgctagaggaaacaagaagaatgttcatgcagagttttcacttgatgaggaaaaattagctttttatcccaatgccgagggtgaaattgattatcatgacaatcatgctaatccagaccaaggcttgatgacagtccttgaacatagcacagatgctatcgatatgtatttgcatcatttgccagacagcttaagcaatgacattaaggagttaaaatgaagtttaaaaaagcaagtttatcagatttggaaatccttgtttccaccagagtaaatgttctacgttcagccaaccaattagacttgtcagtcgatatgaaggaagttgagaagtcgtcaagactttattaccaagaagcgttggctagtgataatcatactgcttttcttgtttataatgatgatgatgataatgttatcggcgctggcgccgtgtcatattatcaggtcatgccgacttatcataatccaagtggcaaaaaagcttacatcatgaatatgtatgtcgcacccgaacaccgcagaaaaggaatagcaacaaaattgctagatttattaatcgccgattcaaaagaacgaggcattgaccatattacgcttgaagctacccaaatgggaagaaagctctatgaaaattacggcttttgtcaaatgagtgatgaaatggaatacaccatgattagcgaagattaattagttggtaaacatacatacaggcatccccgctctcaaaactgagcggggaatttttattatttatgactcttttccaaattcttgaagaatattttcacagatagtggtcatttcttcgggtgattcggtacaatcgttattaacccaagcttgcaagagttgaaacatggccccaatggcaaattgctgttggtaaatatgattaaaatggcgatgattaattagcgcagacttgtcgatatgtttactccaagagagattaagccagtacaaaatctgattatcacgtaatatcagtaaaaatgctttttcttcataccaatattggaagaaaaaatggcaaaaagccataaaattgagtcttggtaatgcttttatctctttaaacaattgcaaggttttttggtctgaaatttcccttaaaatatccccaatctctatataatgacgataaaaagtccgtcgagaataacctgctttttcagccaaagctgctacttttatggtctctagtcgcttttcttttagaatcagtagcaaagctgtttgaaaatcatttcgggtattttgaatttgttcaagtctttttggattcttaactgtcacactttcacctctatgtgccatttctttagaaatatattgtttaaaatcaagtattattatatcatattcgtgtcgaaaataactgtcacaaaggagaaagaatgatgacaagattgataaaaaattggtattttatatcagtatttatggcgggattattcacccttgttcttggtattggaagttggaattggtctcaaaaaatgattttagtcaatactatttttatctttcttcacttttttgaagaattcggctttccaggtggatttacctattgctatgaaaaccgaactaaaattagcgagtgatgatccaactgaatggccattgaatcatgtatcagcatggtttggtaactggtggtttgcccttagcgtttatctattagccttatgtttgccagaagtgaaatttttaaccttaaccgtagccctcttctcatttgcagaattagccatgcatactctttattttccgctggcactcaaaaaagtttacaaccctggtttaataacggtacttatcggtcttgctcccatgtctgtcgtttatttattgggacaatggcagagttttactatctgggattatctgcttgcgcttgtttggatgtttttccaatattggatagcttttcgctctcctatttatcaaaaattaggaaaatattctcaggattatggcttttctaaagaagaaatagcaagagctgattggatgatgaagtgaggagataaataatgaaaatactaagaaattattggcaatttattagttgggggttattaacgattttgatagcctacttatttttgggaactgggcaacaattaccttcattacaaaagataatgatttaccaatttatggcattattagtacaccaatcagaagaatatatctttccaggtggagctggtcttgtgattaatcgtggaacttatagagaagaaattaattttaaacgctatcccggcaatactcaatcagctttgctagttaatttatcagcttatgttccttttatcatcggaatcatttgctatcgtcaaatttggcttgggatagcactggctttctttaatttgatgcaatttcctggacatgttattagcatgaataaagcgttaaagacatggtataatcctggcatggcaacaacaatttttattttaacaccacttagtctattttatcttattgagatttaccagttaggttttgccagtggtcttaattatttattaggtttagttgcctttatcattattgtgtcattgactgttgttttgcctgttcaatcgttgaaaaatccgaattcaccttatgccattcctgataaccaagttcaaaaatttgataaagtcatgacttgggcaaaacgatagaaacataaaaatgtaagaaccgtagctatttgtgttacggtttttttttaaatggtttatcaatcatgctgtaaattgtctaaaaatagttaaaaatgagattttttgttatattagggatgagaagatatgataagaaagaggaaggatatatgataggcgttatcatagtaagcttaatcgtaatagttattattttatcactaagaggtgggaaattacctcgctctggctacccaaatggtatttcggagagaaagaatttggaaatagataatggggttcttggactggtgttgttatctgatgatatcaacaatcctgttcttttagtgtgtggtggaggacctggtattcctcaatacttacttgaggctatctatgcctccccattgaaagagctatttacagtatgttattgggattacagaggaacaggggcatcttttgacgcaactataaaacctgctgatatgacaacagaaagatacctaaaagatttgcttgctgttacggattacctatcacagcgcttttcacaagacaaaatttacataatggggcactcctttggaacctatttagcgttaaaagcagctcaagcctatcctgacaaatataagtgttatattgccatgtctcaaatatgtaaccaaaatctgtcggaataccttgcctttgatgacatgttacagcaatataaaagcattggaaataagcgaatgctggacaaacttgagaaatatgatatccgccagtcatcagaggattataacgattactttttttctgggcttagagacaaggcaatgcatgatttaggagtaggaacaacaagaacgatgcattcagtgataactggcattttctttccaagtcttagttgtagagcttatacgcgaagagaaagaattaatatctggagaggaaaagccttatcggcagcatttcctgtgacacaggacgcagtgaattttaacgcatttgatagtgattggcagttaaaaataccgatttatttctttattgggcgatatgattatacgtgttatgcctctttgcagcaagaattttatgaaagcattgaagcaccacaaaaaggaatgtatattttcgaaaattccgcacatagtcccatttatgaagaacacgaaagaggaaaagagggacttagagaaattatatcctgtgtaactatttaataaaaagtaagacatttcagcttgaaaagtctagttttcactagtttcaaatggtttaaaattaaaatttttgttatattagaaatgaaaggatcgtgtttgaaatgcttgaagctacccaaataggaagaaagctctatgaaaattacggcttttatcaaatgagtgatgaaatgcaatattgtaataaagattaagccgcgtggtgctatcatagccacagttaataaagaaaagaggatatcaaatggtgacaaatattgattataaatctattcaaaattttaaatgtagtgatctagaacgtttgtttctgtctgtggaatggtcatctggtcattttcctgaaaaattagtccttgccatgcagaattttaaaaccgtttattcggcttgggatggggataaattaatagggatgatttgtgtcatggatgatggggtgatgaatgcctatattcactatttacttgttgatccagactatcaaggacatgctatcggtagaaagttggttcagatggtaaaggaaaaatacaaatctttcatgcggattgcagtgattggatataataaagaaattaacttttatgaaaactgtggttttgttaaaagtgaagattgctcaccgctttttatcacatccttatggacttagtttttagtattaatgattgaaaaggagaaaatatgataagaaaagcgagaaaagaggatatttcacgaattgcggaaatacttgtctttgtaaaaagaataaaattccgtccgatttttcaagatgatgacttttcatttggtgagctacaagtgatttcagttgcgaagcaatacattgacgaaggcattattgacaatattttggtttatgatgacgggattgtcaaaggattcattcgtgtagagggaaatgaaattgtcgaactgtatgttgactactttttccaaaatcagagcattgggtctgccttaattgaatacgctaaggcacattatccgattacatttttgtgggcaattgaaaaaaatcaagatgccattcgtttttacgaggcgcatggctttcacttaaccgacacaaagaaatttgaagaaggaacaacagaatatcttgtcatgctaacaagagaggaatcgtgaagagtggtatttgttaaaagtatcattttttaacgtcactaaggatttaattttataaaatggagatggaaaatgaaaaaagattttatgacaccaccagagcacgtgaattttgaagctaagaaattatttgacaatgttggtgaaattattgatggttcaattgcttatattaacctaaagggtggtggtccgataaagcagcatactcatgaacataatcatcttttcattgtgacaaagggtgaggctaaagtgttacttgataaagaagaagtcattatccgagaaaacgaagcttttttggttgaagggaaaattcctcattcggtttggagtaatcaagacgaagaaacggttatgattggcatttcggtcaaataacggttaataatttcaagctagttatttttataaaattttaaactatttatctaatcaccttgtaaattgtctaaaaatggttaaaaatgagattttttgctatattaatagtgaaaggagcgtgtttgaatgcttgaagattacatgcaaaaagcgattcaagaagcttatgacggcattaaaaaaggtgacggtggtcccttcggttctgtgattgtaaaagatggcgagattattgctagcggtcacaatatggttctagctcatcatgacccaacagcacacggagaagtgacggcaattcgtaaagctggtgaaaaacttggcacacatgatttgtcaggaacaatcttatttacaactggtgaaccttgtccaatgtgtttggctgcgtgcctctgggcaaatattgacaaggtttattatggttgcaccattgctgacaatgccatgattggctttcgtgaccaacgttttgacgaactcatgggcggacgaaaaaatctccccaaagattacctcgttcaattaaaccacgatgactgcttaaaactcttcaaagattatcaagaaatgacacataacctttactaatggaacaaatatgactgtggctcactaactgcagtctattttaattaaaatgttataatatcactaatagctttttagaatttagcgaataaaagtaaaggagcagtctaatggataccaaagagaatattcagcaaacttttgtgcgtcagtacgctcaaaaggactatgcaatgatgacaataaaagacctttgtgctgctgttccaatagctaggacaacattttatacctattatgacaatcttgatgacctaaagacagaaattgaggataatttgataatggggttgctaaatgtggtcaatgagattgctgatggtgatattgaaaagatgatttttgctgaatttcttgatgcaacgcaatgttacattcaagcacattgggacactttcgatacttttctaattcgtcagccaaatcttaggtttattgataaatggaaagcagccattaaacaaaattttaaaaaacgttatcctgataaaatttccttaccaaattatgatttgatagctgaaatgcttgcttctgcaacgattagtgcttattcttactggatgcaaaatccaagcaaggttaataccgaagaaatgaaaaagttgattactcaagctctcgaaactatcgtaaaacttttagaactttgaacacatttgtcatttttgtagtgtgaatgaaacagtctttgttttataataaagccaataaaagttagttacccaataagggaggaaatagtcttatgggaaaaattaaaattcatgtttttcatactggtgaagtttgtgtcgctcccaaattgccttttggtggagatgattgtagtgtgattgaagcatcaggtatctttggcaaaaaagaagaccgcatttggcttcctgtttcttcatatctaattgaacacccaaaaggaacctttcttgttgatactggctggtcacgagatatgagcccgaacggtgtttttgataaaaaagcgcaaataaaatcactagatagtagattactttacaaaattaatcaaggaaaagttggtttgggacaatgtattgatgaacaactattaaagctaggaatcaaagattcagaccttgatgcggtgcttttgacacatcttgattgtgaccatgctaatggtttaaaacaagtcagcaacgctaaaaaatttctggtatcagctgacgaagtggcatttgctcaaaaattaacgaatagagtccgttatcgaaaaacttggtgggaaggcgttaatcttactgcctttgattggaatgacactcaaggagcattttcaaaatcttatgacttgctgggtgatggttcgattgaattaattagtatcccagggcatgcagatggcttatttgctgtaaaagttaaaaatgacgaaggcaaatttgtcttattattttcagatggcggttatgcgacaaaaagttgggaacaaatgattacatcaggtattgctgccgacagagaaaaacaacgtcagtcgttagcttggattagagaacaaagtttagaccctaattgtattgaatctttggcaaatcacgattcagatattcaaccccatgttattgaattttaagaaataaggaatccccccaattatagaaaagttaatggacccccccaatagcaacagcgagttgcttgtcaaagtgggattttatggcataatgaaaaagaagacgttaaaaggagattattattatggagattcaagaagtattgaaaaatttgcgtgacaaatatcagttaacgcaagaagaattagcagcgcgtgttttggtgacaaggcaagcggttagtcgttgggaaacaggtgagacacaaccaaatacggataccctaaaattgctttcaaaagaatttaatgtatcgattaacaccctgcttggctcaccgcgtcagctgatttgtcaatgttgtggcatgcctttgacagaagatgaggtcatcagtcgcgagacagatggaaacttcaacgaagattattgcaaatggtgctatgtagacggtgcgtttgcttacacgacaaaagactcattacttgattatctagtggcaaatatgccaaatcctgacaatctttctgatgaggaacgtcgtttgcaatttgatgcttatttgtcacaattaaaacattggaaataaaatattgaaatacgtctcagaggatataggtgcgtgtagcgcttacatttatcctctgggatattttttgattccaagaagcaaatccatgccataaaacggcaaaaaatcccaaataacagccttttttatcccaagagacctagagttttcattttttgtgtgataaaatggtattgtgaagttctcgtaagcgtctgagaacaaataaatttaggaggaaaaaagtggacgcttttaagtatattaaacctaaactgttcagtactcttaagaattatacgggtgcgcagtttgcaaaagaccttgttgcagggattattgtggcaatcattgccttaccgttgtcaattgccttagcgattgcgtcaggtgttaatccagaacaaggtctttatactgctgttgttgcaggtttttttatttcatttttaggaggtagccgtgtccaaatcggtggaccgacagccgcattcgttgttatcatctatggaattattgcacaatatggtatggcaggtcttaccattgcaacattcttagctggtatcatgatgattgtcatgggattattacacttcggtgatttgattaaattcatccctaaaacaatcacagttggttttactttgggaattgctgtcggaatattggttgggcaacttaaagatttcttcggattgagcatgggtgctgttccagcagaatttgctgaaaaaatgatagcttatgcacaacatatcaatactattcattggccaacgttgctaattggtctgattgccttactaatccaaatcttctggccacgtgtttctcaaaaaatcccgggttcactggtcgcgattattgtcacaacagccattgttggtttggggcacatctcatctgtcaaaacaatcggtgatttgtatactatcaaggctgggcttccaacatttacaatgccacaattatcattcggtcttatccgtcaaatgatttcaccagcttttaccattgcgattttggcttctattgaatcacttttatcatgtgtggtttctgacgggatgattggtagtcatcatcgttcaaatgccgaattggtcggacaaggtgttggtaacatgatgtctgctttgtttggtggtattcctgcaacaggtgccattgcacgtacagcagccaatgttaaaaatggtggacgtacaccaattgctggcatgatgcacgccgtgactcttcttttgattttgttgttcttaatgccatatgcatcactgattccaatgagttgtttagcatcaatcttgattatggtggcttacaacatgagcggttggcggacatttgttcatatgcttaaaaaagctcctaagagtgatattgctgttttggtcattacacttgtgttgacagtattcttcgaccttgtcgtagctatcgaatttggcatggttttagcagctttcttgttcctaaaacgtatgtcagatgtagcagctgttcgccaatgggtcgataaagacagccttgatgacaatgaactttctgaaaatactgatttgaaacacgtgccaaacaacactgtcgtttacgaaatctttggttcattgttctttggtgccgcaaatgacttccttaattttaaccatgaagaaggtaaaaatgtcttgattcttcgcatgcgtaacgttcctgccatggatatttcaggattagaagcactcgaagaaacactagaaatttgccaaaaacgtggcatgacattgattctttctcacgttaacaaacaaccttaccacgttatggaaaaagcagggtttattgaaaaagtcggtcaagaaaacctttgcgaaaatatcgatgcatcccttaaacgcgcagcaagcctcgcttaagggttatatagataaaggtcagcagatatgattctgccgaccttttttggttggttttctaatttttaattcctagccatttatcacggtagttgccaaggaaattttcaataacgttaagaatcgagccgactagaaaagccgcaataattgtgccgattcccacacttcccaagcctttgataaagataaggcatgaaatcaaggaaatgacaaccattgtaatatcaaagccgactttgacctttggaaaagcgataccagtaacatcagagacagctttcattgccccctcaccagcaagtggcatgatattaggtggtaaatacatgaaaatcccaaaagcaatgataacagttgaaattaacatcatcaatagacgaatcaccaaattttcaggagtcggtaagaaagaaacaccccagttacaaaatgttgtaaaatacccaaaaacaataccgacaagaacttggagtaaattaacaggtttaaagtttcttctaagtaaaatcatttgtaacaaaaccaaaaaacaatggaaaataatcgttgctttccccatttcaattccccaaatacaagtcatcgtgtagggaattgagctaacaggtgaaaccccaaggtcagacttaacagacaaggcaactccgattgtcattgtgaaaagtccaagaaaatacatgataagtcgtttggaaaggtggtttctcatgctttatcacctccagaaatattattgataccttgccaaatcttatcaagtaattcttcagctaattgctgttcgtcttttgataggagttggagggcattggtatcctcttcatcgaaaatgactttcatttgttcagcaacagtctttccgtgttctgtcaaataaacataaaaagaacgacgattgccagctttttgacgacgttcaacaagcccattttcttccattcgtataataatatttccgagtgttgcttgctcgatttcacagagtttagctaatgttttttggtcgcttccttcattttcaagaagggcatcaagcactttaggttgaccagatgacaaaccaagctctttttgtgctctcgcaaaaatgcgacgcccaagcgctgtatgggtgcgcattagttgataatgtaatgtcatataacctcctttagtaaaatactaagaatacttattataagcattcttagtataacacaaaaagatgttactgttaaccatattctaaaagtaagtgttttcaaatgacatatcatgcaaactattgtatttatgataaaaaatgatgtcagattatttcagtattttcaaagcagtagcagggataaatggcttttaatatttcgtaaaaatgatagctagttatttttagaaactctcaaaaaattgtctttttagggaatataggctgattttcttatgaaataagtcaattttctttcatttttctttcagaaaaacactttttgaaatatttattaattttaaaattttctgtatttttcaaaaacggtgtgttataatacttaacatactgaaagaaagttatggttaggaggaaccattatggagtttaaatcaacttggaaacgtgttggtttgggagtagttagtttggcgtcagctgctcttttagccgcatgtggaaacagtagttcatcatcgtcatctagtaacgagattaattggtacacaccaactgaaattttaacactagatatttcaaaaaataccgatcaatattcagcgcttgctatcggaaattcatcaagtaacctgcttcgtgtagatgaaaatggtgacccacaaccagacttggcaaaaagcgttgagatttcagatgatgggttgacttatacagctactttacgtgatgatctcaaatggtcagacggcagtgatttgacagcagatgattttgtttacacttggcaacgtatcgttgatccagcgacagcttctgaatatgcttatttggcagtagagtctcatcttgaaaatgccgataagattaattcaggtgaaattactgaccttagtcaattaggtgttaaagcagatggtaatacaatcacatttactttgacaagcccatgtccacagttcaaatactatcttgcttttgctaactttatgccacagaaaaaatcattcgttgaagaagaaggcagtgattatggaacaacatcagatgaccaaatctactcaggaccatatactgttgaagattggaacggtagtgacggtagcttcaagttggtaaaaaataaatactattgggatgctgacaatgtcaaaactgaaactgtaaatgttcaagcgattaaaaaagcagacacagctgttcaaatgtacaaaaatggtgagctagatacggctaatatttcagcaacatcatctatctatgctgctaataagagcaatgaagatgccgttgctgttcaagaagctcgtttaacttacatggtttataacgaaactggctcagttccgtcactagctaacactaagattcgtcaagcacttaacttggcaactgaccgccaaggtgttgtcgaagcagctattgatacaggttctaaaccagcaacatcacttgttacaccaagtctagctaagttgacagacggcacagacctttcagaatatgtttcaccaggatatagttatgatgaagatgaagcagcaacattgttcaaagaaggcttggctgaattaggaactgactcaatcacattaacgattacagcagattctgatgatgctgttaccaaagcagctgttgactatatcaaacaaagttgggaagatgctctaccaggattgaagattgaagagaaattcgttaccttcaaacaacgtcttgaagatactaaaaaccaaaactttgaagtcgctcttgtgtcatggggtggtgactatccagaaggttctacattctatggattgttctcatcaacttcagcatacaactatggtaaagtgtcaagttcagaattcgatgaagcatacaacaaagccattacaacagatgccttggatacagatgcagccgctgacgattacaaagctgctgaaaaagccctttacgacggcgctcattacaatccaatctacttccgtagtactgaatggctacaaaatccttcaatcaaaggacttgtccgcaattcaactggtttgacagtagatttcacttacgcttacaaagattaataatcaaagacaaggttgagattggttcaaccttgtttttttttaaactttatatgtaagattctgagagtggtagttggaatgacattgatttttgatgttagcttttctgatattgtttgtatgataaaacaaaaaatacttagattattcaagtttttaatatttattaaaaatgaaaacgttaaaatggctttaaagtacataaaatagcatttttatgcatattctggcgttaattctcataaaagtgtgtaaaatgagtgaaaaataaatgtaaccaagctttttgaaaaattaattaatttacaaattttctgtatttttagaaaatactgtgttataatagttaacataccgaaagaaagtttatggtaggaggatccattatggagattaaaaattggaaacgtgtaggtctaggagctgtgaccttgttatcagcggctgttctagcagcttgtggcaatagcagcagttcatcatcttcttcaagtgatgaaatcaattggtttatcccaactgaaattagtaccttggacatttcaaaagttacagatacttattcatcaattgctatcggtaactcaggaagtaaccttcttcgtcgtgatgaagatggtgagttacaacctgatttggctgaaaaagtagaagtatctgatgatggcttgacttatacagcaacacttcgcgatgaccttaaatggtcagatggtagtgatttgacagcagaagactttgtgtacagctggcaacgtattgttgaccctgcaactgcttcagagtacgcttatcttgtatcagacgcacatgtcttgaatgctgaagaagttattgcaggaactaaaagtgttgatgaattgggtgtcaaagcagatggaaataaacttattttcactttgtctgacccttcaccacagtttatgagcttgctttcatttgcgaacttcatgccacaaagcaaagactttgttgaagaagctggtgatgattacggaacaacttctgaaaaatcattgtattctggaccatataccgttgaagattggaacggtacaagcggaacattcactcttgtgaaaaataaatactattgggatgctaaagacgttaaaactaaaaaagttaacgtccaaacaattaagaaaccagatacagctgtgcaaatgtacaaagatggtgaccttgattacgcaaacatctcaaatactgaagcaacatacaaagctaataaaaatcgtgatgatgttgttgacgttccagaagcaacaacagcctacatggtttataaccaaacaggtactgtaactgctttgaacaacactaaaattcgtcaagcccttaacttggcaactgaccgtgaaggaattgtaaaagctgctatcgatactggttcaacagctgcgacagctcttgcgcctacgggtcttgaaacattggcagacggtactgatttggctgaatatgtttctccaggttatagccatgatgaagaagaagcagctaaactcttcaaagaaggtttggcagaacttggcgctgattcagttacattgacaatcacagctgattcagatgcaccagttgcaaaagctgcagttgactatatcaaagaaacttgggaaaatactctttcaggtttgacagttgaagaaaaattcgttactttcaaacaacgtcttgaagatactaaaaaccaaaactttgatgtagctcttgtgctttggggtggtgactatccagaaggttctactttctatggtctgttcactactaactcatcttacaactacggtaaattctcaaatgcagattatgatgcggcttaccaaaaagcaatcacaacagatgctttagacccagcggctgcagcggatgattataaagctgctgaaaaagcactttatgacaatgcgctctataacccaatctacttccgtagtggtaaaggacttcaaaatccagaccttaaaggacttgttcgtagctcaactggtttgtcagtagatttcacttacgcatataaagaataaatccaatcaaattaatgtaaaacaaggttcgggctttgcccgccttgttttctttgtgccttgaaaaatgatacaataaataggaagtcgtttgaaaaacgtaagaataggtaaaggaaagaagatgcggttagataaatttttagtagaagcaggcatagggtcgcggacggaagtcaaacaactgctaaagaaaaaacaagtgcttgttaatggcaaagtggaaatatcacctaaaacacagattgatgagaaagccgaccggattagttgtcaggggcagacgctttcttatgaaaaatacgtttattatatgttgaataaaccaaaaggtgtgatttcagcaacggaagataatcatcataaaaccgtcttagatttgctcgataaaacagcttgggataaggaagtttttccagttgggcgtttggatattgatacgcatgggcttttactattaactaataacggtaagttagcgcatgccatgctatctcctaaaaaacatgttgataaaacttaccgagccaaagttgctggtctgatgacgaccgctgatgtggcagcttttgctaacggtattgacttgaaagatttcacttgtcagccagcgcagttagtgatccttgaaacaaatgaagcagaaagaacaagtgttgttgaaattaccattaaagagggaaaattccaccaagtcaaacgcatggtacaggcttgtggtaaaaaagtgacagatcttcaacgtctcagcatggttccacttcaattggataaacaattggctcttggagagtggcgtcgattaacagatgatgagttagcaagccttgaagaatttgacgttgaattgtaaatttctgcagtagttatttgattatttggggcaatcatgttaagataatagtaataaattcaatgagcgaggtgtattaaagtggcatttggtgaaaacggaccacgtaaaaaaacagcgtttgaaaaactgactttagtagttgttatcttaatggttctagtaaccgtaggtggtcttattgcgactgcaattggttcaattatttaaagaacgctgaagaggcgtttttttatgctttaacccatcaaactttaaagcaatttttacaataatgaaagaataggaattaataatgagtatgtttttagatactgccaaaattagcgtaaaagctggtcgtggtggtgacggaatggttgcctttcgtcgtgaaaaatacgtccctaacggtggaccttggggcggtgatggcggtaaaggtggttcagtcatctttaaagttgacgaagggcttcgtaccttgatggactttcgttataatcgtatttttaaagccaaatctggtgaaaaagggatgacaaaaggaatgcacggacgtggtgcggaggaccttattgtccgtgtcccacaaggaacaactgttcgtgatgcggaaaccaataaagtgatcactgaccttgttgagaatggtcaagaattcgttgttgctcgtggtggacgtggtggacgtggtaatattcgctttgcgacaccacgtaacccagcacctgaaatcgctgaaaatggtgaacctggtgaggaacgtgaccttcaattagaattgaaaatcttggctgacgttggtttggttggattcccgtcagttggtaaatcaacattgttgagtgttgtgacagctgctaaacctaaaattggtgcttaccactttacaacaatcgtgcctaatcttggaatggttcgtaccaaatcaggtgatagctttgctatggctgaccttccagggttgattgagggcgcttcacaaggtgttggacttggtacacaattccttcgccatattgagcgtacacgcgttatcttacacgtgattgatatgtcagctagcgaaggtcgtgacccgtatgaagattatgtttctattaataatgagcttgaaacctataatcttcgtttgatggaacgtccacaaatcattgttgcaaacaagatggatatgccagaagcggaagaaaacttgaaaattttcaaagagaaattggcagcgaattatgatgattttgaagaaatgccaatgattttcccaatttcaagcttggcacatcaagggctagaaaatctaatggaagcgacagcagaattgcttgctaagacagatgaattcttgctttacactgatgatgacatgattgacgaagaagtttattatggctttgacccagatgaacgtccatttgaaatttcacgtgatgacgatgctgcttgggtattgtcaggtgaaaaacttgaaaaactctttgtcatgacgaatatggaacgtgatgaatccgttatgaaatttgctcgccaattgcgtggtatgggggttgatgaagcccttcgcgaacgcggagctaaagacggagacatcgtccgaatcggaaacttcgaattcgaatttgtggattaaaatacgatacaaagtccgttaagcgagcaaagcaaaaataggaattttgacgaagagccgtgagctctaggaaaaaattatcttttttgcatagctcgtaggacgtgttcagttactatgttagtcgttatagtggactagctaccaacttactaactatgttaaggcagtaagtattgactgtcttaactccgtgtcgtaacagttctattaagtattgcctaggatcttactagctcgaaaatggtttattatcgaaaccattttctcacgtcgtaacgtatgttctaacgacgtgtttgattgctgtgctggtttgcttaaattggaagaattataaattttaaagattaataggaattgtgatgattcacaattgagcttatattacattttactggaggttcttatgggtgataaaccgatatcttttcgagataaagatggtaattttgtatcagcagccgatgtttggaatgctgaaaagctagaagaacttttcaatacccttaatccaaatcgacgtttgcgcttggagcgcgaaaaattagctaaagaaaaagcaggcgaagccaaggatcaagaatcataatactcgccttacttacctgcataaaactcgctttttaattttcaggctcatgaaaaaactgtccagtggacagtttttttaatatttttgaagttctttgtcagttaattgataacgtagattagcaatgtcgtcaatgaattttctatcgtgagaaacactgataatacagccgttaaaatttcttaaaagttctctgattaatggctgactagttggtgaaaaatgccttgttggctcatcaagaattaagatatgattttgggctaaaaccatacgtgctaagaataattttgctttttgcccacctgaaagttcaaggacggagtgttcgatttcttgtcttgtaaattgaaggctggcaaggagtgttcgagctttttcgctgtctgatacctgtgttaaaaatgttagagcggtcatttctttgctaaaaacactatcgtaatcttgtggcatataaccgattgaaaaatgatttttatttagctcttggtaaatttgtgtgagcaggcgtgtttttccgataccgtttctcccagtaatcaccagtttatcttgacctaaaatggttaaactgactttttggccagttgataaatcatgattgccccaagatagaagttttttctttttatcgagagggacaatatcatcgaaaaatagttttatactatccatttcttcaggaaaatcgaccattttttcttcttctttggcataccgtttttcaagagataagacatttttcatctttttagcagctaatctccccatagtgctatcatgagtatttcgcacattgtattctgccgcctgatgaagccgttgtattttagcgtctcttttagcttttatactgcggtcgtttttggcttgtcccagttgtttggtgtaagctttgtgacgataagtcatataatctgtgtaacttcctgaaaaatagcttgcgcgagcaacttgacgacgctttattaattcaaggtgtagaatagcagtagcagttttttctagcagggcttcatcatgagagataaaaataattgttttgtcagatgattgaatgaatgcttgtaaagtattaattgcctgcgcatcaaggtcgctagagggttcatctagtaagagtaaatcattggtttcaccaaccagtttagcaagttgtaactttaatttttctccaccagataaacttttcaaactctgatttctattttctaaggattgaatatccaaatctaatcgcgcagccatttggtaaaaagcattgaaatcgaaactaacataatctaaattatcataaagaaattctgaaactgtcatcttttcttgtttttgtgacaaagcttgtggtaaatatccaattttgggaaaatgattatcaatttttccctcgagaatacagtagttagccattaattgcggagacaaaatagcctttaaaagtgttgactttccagtaccctcttcgccaataatagctaatttatccccagaattgacgattacatttaaatcagaaataagctgtgttaagtctttaagatgtgtaattgttaaatgattaatttgtagcataagaacctcgctttcaataaaaaactctctaccaaatcaagtagagagtgaggctttctattaataaaacaaaatagcactaataaaggcggaaaatagccatctattagctgaggaagtttattaaagagcgcactaaaaacaaaacttgatatggtagtatcaaaaattctgttcttagttgttcattgctccttttcctcctgaatgttaatttgatattagtttatcaaaaggtgctataaaagtcaaaggttatagtaggtagtgttaataagtgagttagctaagtgctgtaatacctagcatagaaacctaacagctttaacttaacctagtgagaaatctagtcacctaccaaatagtaggtgacgtaaaaggtcgagatgctttagcatccgacctttttgatttatcacacattcaagactttatcaaggaagtcttttaggcgtgggtgttgtgggttgtcgaagatttgttctggtgtgccgtcttcgaggaattcaccgccgtcagtaaagataacgcggttggcaactttacgagcaaatcccatttcgtgagtgacgattaacattgtcatgccttgttctgcaagatttttcataacattaagaacatctccgaccatttctgggtcaagtgcagaagtaggttcgtcaaaaagcatgatatcaggattcatagctaaactgcgagcgatagccacacgttgtttttgtccccctgataagctttcgggttttgcgtcacgtttatcagctaagccgacttgttcaagaagttccatggcatgtttttctgcctcttctttgctttccttacctagttcgataggcgcaaaggtaatgttttcaagaactgtcatgtgtgggaaaaggttaaagtgttggaataccattccgatatcctcacgaactttatcaacatcagtttttgggtcagaaagttcatgaccgtcaacgataacttttccacttgtgattgtttcaagtaagttgagggtacgtaggaatgttgatttccctgaacctgaaggaccgataatacaaacaacatcaccttcgtggaactgagttgtgattccttttaggacctcattatctccataagatttgtgcaaatcttgtacatcaatttttaattctgccattatttaagcctcttttctagacgttttgctaaacgtgtcaaaagggtgatcattacaaggtagataactgctaagatagcatacatacggaaagattggtagttacgagcaatgatgattttaccagtttggaagagttcaacaagaccaattgctgatacgatagttgtatcttttaatgaaataacgaattggttgatgaagtttggtagcattaggcgaacagcttgtggcaagataattttttgcattgtcttaccatatgaaatacctaaactacggctggcttccatttgaccttgaggaacagcctcaataccaccacggacgatttctgcaatgtaagcaccaccattaagcgaaagcgcaatagtagctgcaacgaaatcgttgattgggctttgtttgccagtgatagactcgagaaggtttggaattccccagaagataaaggcagctacaatcatcaatgggataccgcgtacgatgtcaacaaagacagctgaaatagtacgaagaactttgtttggcgcaacagccatcataccaaagataataccaataaccatggcaattgcaaatgaaatcagtgttaagctaagtgtcttgcctaaacctgaaagcaattgtgaatagttattttttaggagtccccagattgttgtttcatcaacgcttgatgaacttgagcttgaacttgaactatcgcttgtaccaaggtatttattgacgatttcgtcgtattcgccagattcaactaaggcagcaagaccgttgttgaacatttcaatcaattctgggttagaacctttgctaacggcaaatccgtattcaccggatttttccccagcgataggtgtttcaaaatcacgtccttgttggatagcgtagagtagaacggcttcatcatccattaaggcatcaatagaaccggagttcaagctgtcatacattgttgaggcttcgtcaaaagctttcaaggtataaccgtattcgtcagcgtgttcagataaccatgtgtaagatgatgttccgtttttagctccgacagttaagcctttcaaatcactataacttttaacgctgctaccagattttacagcaagtaagatatttgaagtgtagtaagcatcagagaaatcaaaaatttctttacgagcgtctgtgattgacatacctgccatgaccgcatccgcttgtcccgcttgaaccgcgttaagcgcagcatcaaaaccagggttagaaatttcaacgttgaaaccttgttgttcagcgatagctttaatcaattcaacgtcgataccttcatattcaccagaatcattttggtattcaaatggtgcgaaagaagagtccatgacgattttgtaagtacttttaacgggtgtagctttagcagaagcgtctccagttaatgttaaggtacttgaagcggctgaactattagatgatgagcttgttgaagaagatgtatatgaatcacctaaccatttttgcatgatttggtcataagtaccgtcttctttcatagcagtaagagcttcgttgaattcatcaatcaaatattcgtagctgcttccttttttaacagcaaaagcgaagcttccgattgattctgcatcaatattgatttcatatgattttccttgattgatagcgtattgaacaactggtgtgtcgtccatcgctgcatcaatagaaccagaatcaaggctgttattcatcaaatcgctagtatcaaatgttttgacagtatagccatatttatcagcatgttcgtcaagccaagtttgggcagcagtaccatttttaacaccgacagttttaccttttaattggctatattttgaaatggctgtgttaccacttttggtgtagataacgattgaagtatcataataggtatcagagaaagtaaagactttcttacgtgcatcagtaacggttgttcctgccataagagcatccgcttgtcccgcttgaacagcgtttactgcagcatcaaaaccagggtaagtttgttcgtagtcccatccctcgcgttcagcgacttctttgatgatatcaacatcaatccctttataagtttggtctgaatctttaaattcgaatggggcataagctgtatcagatacaatgctaattgtgtccgcttgagctttgacaccaaacacaaagaatacagagaatattgctagcataagagctttcaatttgtgcttcatgttagtctccttttggttagaatagtattattataccaaaattcagacattaaggcaaatttaagaaacatgtgatgttagaaaaccttacatgaaatagtataattttagcaataatagtctaaaaatcccttttttactgacttgtgttacaataagagtaataaatttcagttttgaggattatcatgatagatagagtagagaacaatcaatttaaattagtatcaaaataccaaccgtctggagaccaaccagaagctattgaggctttggtggataatattgaaggtggggaaaaagctcaaattcttcttggagcaacaggaactggtaagacttatacgatgagtcaagttattgctaaggtcaacaaaccaacgttggttattgctcataataaaactttggctgggcaactttatggggaattcaaagaatttttcccagacaatgctgttgaatattttgtgtcttattatgattactatcaaccagaagcttatgtgccttctagcgatacttatattgaaaaagatagctcggtaaatgatgaaatcgataaattacgccattcagcaacatcagccctactagaacgtaatgacgttatcgtagtggcgtcggtatcgtgtatctatggtttggggtcaccaaaagaatatgctgatagtgtggttagtttgcgacctgggcaagaaatatcacgtgaccaattgttaaacgatttggttgacattcaatttgaacgaaatgacattgattttcaacgtggtcgttttcgtgtgcgtggcgacgttgtcgaaatttttccagccagtcgtgatgagcacgcttttcgtgtggaattttttggtgacgaaattgaccgtattcgagaaatcgaaagtttgacaggtaaagttcttggtgaggtggaacatttagcgattttccctgctacacacttcatgaccaatgaggaacatatggagcacgccattcacaacattttggaagaaatggaagaacaggtcaagcagtttgaggcagaaggaaagttgatagaagcgcagcgtattcgccaaagaacggaatacgatgttgaaatgcttcgtgaaatgggctatacgaatggtgtcgaaaattattcgcgtcatatggacggtcgttcagaaggggagccgccgtttaccttacttgatttcttcccagaagatttccttattatggtcgatgaaagtcacatgaccatgggtcaaatcaaaggaatgtataacggagaccgttcgcgtaaggaaatgctggtgaattatggttttcgtttgccaagtgcgcttgataatcgtcctttgcgccgtgaagaatttgaaagtcatgttcaccaaattgtttacgtgtcagccaccccaggggattacgagctggaacaaactgatactgttgttgaacaaatcattcgtccaactggtttacttgaccctgaagtggaagtgcgtccaaccatgggacaaatggatgatttgctcggtgaaatcaatagccgtgctgaaaaaggcgaacgcaccttcattacaacattaactaagaaaatggcagaagatttgaccgattacctcaaagaaatgggggtcaaagtcaagtatatgcattcagatattaaaacgttggaacgtacggagatcattcgtgatttgcgtctaggtgtttttgatgtcttgattgggattaatttgctccgtgaaggaattgacgtcccagaagtgagcttggttgccattcttgatgcggacaaggaaggattcttgcgcaatgaacgtggtcttattcaaacgattgggcgtgcagcgcgaaacagcgagggacatgttatcatgtatgctgataagattacagaatccatgcaaaaagccatggacgaaactgcgcgtcgtcgtgaaattcaaatgcgttacaatgaagagcatggtattgttccgcaaacaatcaaaaaagatattcgcgatttgattgccatttcgaaaaattctgatacagatgtcgcagaagatattccagattacaatgctatgacgaaagcagagcgtcaagagacaattaagaaacttcaaaaacaaatgcaagaagcggcagaaatgctcgatttcgaacttgctgcccaattgcgtgatatggtattagaattgaaagccatggattaggattgagattcatgtaaaagtacactttagaacaccctaaaaacaattaatattaagtattagcgtagagaatagaattcggaggaaaatatgtcacgtgcacagagtgtgattttaacaaatatgtgcttaattgaggatggtcaggggaatgtagtcatgcagattcgtgacccaaaacgttatcgttggtctggttatgcgcttcctggagggcatattgagccacacgaaggcttggttgagtctgttattcgtgaagttaaggaagaaactggtttgacgattaacaatccacaattagtgggaatgaaacattggtacactaaagaagatgaacgctaccttgttttcttatatcgagcttctgactacgtcggtgatattcattcgactgatgagggcgaaattaaatgggttcctcgcaaggaattaccaaaactagatttagcttatgatatgctcaatttgcttcgcgttttcgaggaagatgacctcaacgaactcttttaccgtgaacgtttgaaagatgatttcttacgcgaattttggtaagaaagaaaattttctactataataatgtagtaaaaataaaacagcttggaacaatcgttctaagctgtttttgataattaatttagaaggggaaatgctaggttttagattatttaacagaaccgccagtaataccttccacgtagtatttttgcataaacatgaagagtaatgtgattggaatggcgataataactgaacctgctgtaaatgacatgaaccaatcattgatggtatcttgttgcaacattgagaagagtccaatggcaacggtgtatttacttgtcgcatctcctaagataaccttagcaaagatgaagtcaatccaaggcccgatgaaagccataagcgctgtataaacgataattggttttgaaagaggaagtgtaattttaaagaaaatatcagcgcgtgttgctccatcaatcatggcagattcatcaagtgagtaaggaatggtatcaaagaaccctttggcaatatagaagcctagtgccgcaccagctgagtaaaccaaaacaagggcaagaagcgtttggtcaaggttaaaggcttttaagatgtagtaaacggcaatcatactcataaagccagggaacatattaagcacaagcgctagtttcaagaaaccgttgcggtgtttaaatttgatacgactgagtgagtaagccatagcaaccgtgataaaggttgaaatgatacaagatgctgttgcaactagcaatgtatttaagaaccattgtccaaaaggaaaggcatctgatgtgaatagtttgatgtaattatccagcgtccaagtttttggaatgaagtagttaacataagctgttccttcgccacggaaacttgtaaggacaacccaaacaattggaaagagccagatgattgataaaacaatcagtaaaatatagacaaacgtcaatcttaatcgttttttgtttttcattatttcgcaaccccttccttataagaacttgttcttgtgtaagctagaagactgaacacggcagaaagaacaaagatgatgataccgataacagaagcaaggttgtagtctgctgcagtaactgtcaaattgtaaagccatgtaacaagcaagtctgtgctaccagcttgatagaaattagagttagtaggaccaccaccagtaaggaggtagataacgttgaagttgttgatgttaccgataaattgttgaatcaagttcggcatcataaccagtaaaatttgtgggaatgtgattgatttgaaaatctggaatttgcttgctccgtcaatttcagcagcttcaatttgctcttgtggcaagttcatgatgataccagtagcaaccaacattgttacaggaataccaacccacatgttgacgatgataattgagaacttggcccaaagcggatcagataagaacggcaatggattagcagctgagacgagtccgattttttcaagaatagcattgattggaccagcatcgctaagcaagtttctcatgataagaagtgaaatgaattgtggcaccgcaatggtaataacaaagattgttcgccacattttcttcaatttcaaacctttagtattgataataagagctaaaataataccaaagaagaagtttgttactgtggcaaatactgcccaaatcaaggtccaagaaagcactgggaagaatgttcctgccatacgaccgttgaagatattaccaaagttagtgaaaccaacccaatcaaagagactctttggtggtaggtgattgtggtcataacttgtaaatgccaaacaaatcatgtaaatcaatggcaagatagtaaagagcagaacaccaatcattggaattgccatcaaagtcatgtggaaacgaccattagcaagtgtttcaaaatcttctttgaacgttggaatctttttgttttctttatctagaacataaagattacgcgcactttttaggttacaccagtaaatgtaagcaaagacaaggcagaaaatcaaggctgctaaaccgaagattagcattaacattgagttatcaccctcaacagcgactttcatcttaatgccaccaactgttttctcaacaagtccttgttcttgcgtacccaaagtgattaacccttgcaaactcggaataatcgaagtaacaaaagtaatcaaaaataggatttctgaaagtaagaataaacatcccttaataatctgtttatgatagaaatttgaaaatcccataatcagaaatgacagtttagtatcaaagccaccttttttgaaagcttctttaacagatacactgtcaaaatattgtgaattaatcatacaaaactccttttacatcattattggaagtcactgctaaaagttttaagcttaaatatcttagcaataacttctataatgattaacctaaaaataaagtggggaagtgactccccactttaatacgtcttactcagcagcagctaaatctgcgtcaaattcttgtaatttagtgaggtagtcactactttgaattttaccattatagacatcgctgagaagagcagcactttcagtccagaatgttgtcatttgactaagtttaggtgtaacaactgtgtagtcagatgatgacgccatcttgatgactgcttgtgccaattcgtttgattgaacggtatcagattcttgaacttctttgttcgctgggatgatgttacgtccttcataagtgaattggttttcttggctttcagcgctagtcaacattgaagcaagtttgtaagaagcagcgatacggtctgtgtcagaaccagcaggtgcttggtttacagcgaaaagttttacaccaaggaaagctttttgttgaacagtgtttccaccgattgttacagtagggtaaacagcgataccgagattttcttcaccgatagcttcttgtgcagctgacaaatcccatggtcctgtttcgatagcagcaacactaccatcaccaaatttagacatagcgttttcagctgttaggttaacaaatccgctgtttgagttttggtctgaaatccattggagaacagatacaccagcttcgttaccccagtttgtgccatcaactgtttcaccgtcttctccgaataatgtgtcaccaactgacatgaaaagtggggcagtagcgtaagcattcattgatttgaaagtagcaccaaatgtagctttgcttgtaattgtttcatagttagtaacatcttcttcagaaagtttagacttattatagaagagaacttgtgattcaataccgaatgggaaggcgtatgttttaccattgtattgagcaccagcaactgcttggtcggtatcgttttcagcaatttcgttggcatattcttctggaacttcttgaataacaccagattctactaattgaccaagttggtcatgtgggagtgaaaagacatcagcagctttttctgggtcttttttaacattttcttgtgcttttgaatcgtttgattcaacaacttttacagtgtagccagattcttcttcgaattgtttaacgacttctgaataagattctttagcgcctgttggaacccataatttaatagtcttgcttgatgaagagcttgaactatttgatgaggaatttgagcaagcgactaatacgctacctgcgagtgtaagacctgcaccagcaaggaccatttttttccatgtgttcttcttcatgatttcccctcctagagaaagattagtaatattatttttacagttatattatgcaaccgtttgcagatattgtcaagcgtttttttgaaaaaaatttaaaaaatttgagttttcaaacaaaaaaatagtcacaaaagctgaatttaagcggtttcataacgataaaaaattttttgttaaaaaagttgcaggatataaaagcaaacaattgcagaaaatctgcttttatgtataatagggagtaaaataagattttgcaagtaaaaccttgtcagcactgtaaatctattataaaatgaaaagtgaaaaggagacttagatggttacaataaaagatgtagcggctaaagctggcgtgaatccttcaacagttagccgtgttttaaaagataataaatccatttctcagaaaacaaaagacaaagttcggaaagcgatggcagagcttggttatgtgcccaatgttgctgcgcaaatgttagcaagcggtttgacttataacgttggtttgatttttccaccattaatgactccagatcgtttgaatgaacctttctttatgcagattttgtcaacaattacaagtgaagcaaaactaaatgattttacggtatcaatcgcaacaggaatgacggttgatgaacttgaagaacaggttaagttaatgtaccgtcagaagcgcgttgatggttttattatcctttattctgatcctgacgatcctgttcgtaagtatttaatggacaatgatgtgccctttgttatcgtaggagcaccagaaggttttgaaaacgacattacttatattgataatgataaccaattaatggggaaaaaagcagtagaatacctttaccaaaaaggacatcgtgagattctttttgtgacagatgatttaaaatctgaagtgtcatcagaacgttattttggttacctacgtggcatggagaaattagagcttgatagcaatcccgcactcttatttgaccgtagagatcctatggtattagaagaactgattcaaaaaatcgaagagagcaaagcaaccgctttaattgttattgcagatacgatttcggttagaattacgcagttcttatcttattatcaattgagtgtacctgatgatatttcgattattactttcaataactcagcgtattcaaccctagttcacccgtatttaacaacctttgatatcaatgtttcaaatcttggacgaacaagtttcagaagattagtagagttgattaaatcgcctaaaacagctattactgaaaaaattattgttccatttacacttagagaacgtgaaagtgtacgccaattacacgtcaatgattaactaaaaagagttcaacaactttttagccttgttttaataccctatatcgccttattagctaatgctttttagctattagggcgatttttttgtaaaaattttttaagaaaacagttgacttacgcaaacggttgcgttataatttgcagtgtaaagatagttgataaaggagaaaacgtatgaaaaaacgtgcaagtggtgtattgatgcatatcacatcgctacctggaaagcaaggggtgggaacattcggacaagaagcctatgactttgttgatttcttagttgaaactgaccaaacatactggcagattttaccactaacaacgacaagttatggtgattccccttatcaatcgttctcagctactgcggggaatacgcatctgattgaccttgaactccttagtgaacaaggttaccttgataaaaaagattttgaaaccgttaattttggtgatgatttagagtctgttgactacgctcgtatttttgaattgcgccgtcctattttggaaaaagccgtcaaagccttcttgagccaaaaggaaaatgttgaagccttagctgaatttgaaaaagatactagctggctccaagattttgcagatttcatggcaattaaagaattttttgataacaaagctctacaagaatgggatgataaagcggttgttagacgagaagaaaaagctcttgaaacttaccgtgctaaattaaaagacgctattctttaccataaagtcactcaatatttcttctatcaacaatgggctaagctcaaagcttatgctaatgaaaatgggattgaaattattggtgatatgccaatttacgtttcagctgatagtgttgaagtgtggacaatgcctgaactgttcaaagtagatagtgataaaaatccactttgcattgctggtgttcctgcggatgaattcagcgatgatggtcagctttggggaaatccaatttatgattggaaaaaccatgctaagacgaattatgcttggtgggtttaccgtattcaagaaggcttcaaattgtatgaccttcttcgtattgaccatttcaaaggcttctcagattattgggaaatccgtggtgactacgaaacagcaaatgacggtagttgggaaccaggtccaggacgtgctttgtttgatgttgtcaaagacgaacttggcgaccttccaattattgctgaaaaccttggttacatcgatgcaaaagctgaacagttgttgacggatacagcttttccaggcatgaagattcttgaatttggcttctatgacaccgaaggaaagagtattgatgctcctcataactgtaataaaaatagcgttgcttatacaggaacacacgataatgaagttatcaacggttggtatgacaacttgactgacgagcaaaaagcatttgtgaatgcttacactcaccgtagtgacgatgaaccgattgcacaagctatgcttcggacattgtttgcgactgttagtgatgttgcgattgcgacaatgcaagatctacttgataaaccggctgatagccgcatgaatattccaaatactgttggtggcaactggcaatggcgtatgcttaaagaagatttgacagatgagcgcaaagctttcttgaaagatattacagcactttactgccgcaaaaatacatttaaaacgacaattaaagaagaaaaggaaactaaaaatgacaactaatttcacaaactatctccaatcaaaaggacaaacgcttgctgaattgagcaatgaagatatttacgtagcgcttttgcattacgttaaagaattggcggctgaaaaaccaaaaaacacagcaaaacgcaaagtttactacatttctgctgaattccttatcggaaaactattgtcaaacaaccttattaaccttggcatctacaaagatgttaaagctgaattagcagcagcagggaaatcaattgctgaagtagaagatgttgaacttgaaccatctcttggtaacggtggacttggtcgtttggcatcatgtttcatcgattcaatgtcaacacttggtatcaacggtgaaggtgttggtcttaactatcactgcggacttttcaaacaagttttcgttgataaccaacaagaagcagaagctaactactggattgaaaaagattcatggcttgttccaactgatatcagttatgatgtgccatttaaagatttcacacttaaatctcgtcttgaccgtatcgatgttttgggttataaacgtgacactaaaaactatttgaacttgtttgatattgacggtcttgattatggtttgattcatgacggtatttcatttgataagacggaaatcaagaaaaacttgacactcttcctttacccagatgattcagataaaaacggtgaattgcttcgtatttaccaacaatatttcatggtttcaaatgcggcacagttattgattgatgaagctatcgaacgtgggtcaaacttgcatgacttggctgattatgcttatgtgcaaatcaatgatactcacccatcaatggtcattccagaacttatccgtcttttgactgaaaaacatgacattgactttgacgaagctgtttcaatcgtgaaaaatatggttggttacactaaccacactatcttggcagaagcacttgaaaaatggcctcttgactaccttaacgaagttgttcctcatttggtaacaatcattgaaaaattgaatacattgattgctagcgaatactctgatccagctgttcaaatcattgacgaagctgaccgtgttcacatggcacatatggatattcatttctcaacatctgtcaatggggtagccgcgcttcacactgaaatccttaaaaacagtgagttgaaaccgttctatgatatttatcctgaaaaattcaacaacaaaacaaacgggatcacattccgtcgctggcttgaatttgccaaccaagatttggctgactatatcaaagaacttatcggcgatgactacttgactgatgcgactaagcttgaaaaattacttgcttttgctgatgatgaagctgttcatgctaaattggctgaaatcaagcacaataataaactcgctcttaaacgttacctcaaagaaaataaaggtattgaacttgacgaaaactcaattattgatacacaaatcaaacgtttccacgagtacaaacgtcaacaaatgaatgctctttatgtcattcataaataccttgaaatcaaacgtggtaacttgccagaacgtaagattactgttatctttggtggtaaagcagcacctgcttacatcattgcccaagatatcattcacttgattctttgcttgtcagaagtgattaacaacgacccagaagttaaccaatacctaaatgttcacttggttgaaaactataacgttaccgttgctgaacacttaattcctgcgacagatatttctgaacaaatctcacttgcatcaaaagaagcttcaggtactggtaacatgaaattcatgctcaacggtgcattgactcttggcacaatggacggtgccaatgttgaaattgctgaattagcaggaatggataatatttatacatttggtaaagattctgatactatcattgacctttatgcaacggaaggttatgtatcaactgattactatgaaaatgacccagttatcaaagaagctgttgacttcattgttagtgatgaattagtgaaacatggtaacgcagaacgtcttgagcgtctttacaatgaattgattaataaagactggttcatgactttgattgaccttaaagaatacattgctgttaaagaacaaatgcttgctgattacgaagaccaaaaagtttggatgacaaaagtcgttaaaaatattgccaaagctggtttcttctcatcagaccgtacaattgaacaatacaacgacgaaatctggcacagcaactaagaagtaacgcgcaatgtgaaaatacaaaaggctgagaaatcagcctttttgctattttatacagaaataatgtcaaaatgttgaatttttataaaaatataagttgacaaatgtataaatattaaatataatgtatttatatcaaaaaagaaaagagaaaatgattatgaaggtaagtaaattatttggtggtttagcagtagcggtggcttcgcttttcctattgtcagcttgtggttctagcagctcagaagatacatcagtatcagacatcaaagacaaaggaacacttgttgttgcgttgaacccagagttcgctccgtttgaatttaaaacattggttgacggcaaagatactattgttggggctgatgttgagattgctaaaactattgcagaagaacttggtgtggatgtcaaattctcatcaatgtcatttaataacgttcttgcaagtctccaatctggcaaagcagacattgccatttcaggaatttcagcaacggaagaacgtaagaaagcttatgatttctcagacccttattatgaagctgagaatgttgttcttatcagaaaaacagatgttgataaatatacagatacagactctttagacggtctatcagttggtactcaaaaaggaagtatccaagaaacagttgcctctgaacaattaacaggtgcaaaagtcgtttcattgacacaaaacagtgaaatgattaacgaattaaaaaattcacaaattgaagcagttgtccttgaaaaaccaattgccgaaggttatgttgcaaataacagcgaccttactatttcagatatcacgttaacgtcagatgatgctgatgcttacgctgtcgctcttcctaaaggtagtacaaaattaactaagaaagttaataaagttatcaaggaattaaaagaatctggaaaaattgatcagttcattcaagaggcttacgaattatcagtaagtgactctagcgattctagtgactctgacgactaaggagatactgtatgaaaaagttttttaggggatttatcttactcataatagtaggaagtttgtcagcttgttcatcttcgacaggtgtcagtcaatctagtattcaagataaaggaaaaattgtgattgcaacagagtcagaatttgcaccgtttgaatttaaaacactaatcgatggcaaagatactcttgttggtgccgatattgaactgggaaatgctatcgctgatgctcttggtgttgatgcagatttttcggtaatgtcatttaacaatgtattggcttcggttacttctgggaaagcagatattgcaatcgcaggaatttcagtaacggacgaacgtaagaaagcttatgacttttcggacgcttactatgaggctgaaaatattgtcatcatcaaaaaatcggacgaggcaacctataccacacttgaaagtttggcaggaaaagcagttggtgcgcaaaaaggttcaatccaagaaaacattgcgaaagaccaattgccagattcgagccttgtttccttaacatcaaacggcgaaatgattaatgaattgaaaaataatcagcttcaagcagttgttttggagaaagctattgccgaaggctatgtttcacaaaatgatgatttgatgattgcagatatgaccttggaatcaagtgatacagatgcttacgcagtcgcatttgccaaaggaacagatcaagacttaatcgataccgtcaatgacgttatcaaaaaagctaaagattctggtgattttgatgcttggcttgaaaaagcagcgacttacacacaaagtagttcaagttcagatgaataatgtcaagactgagagcttttcactctcagtttttatgtcatcatgataaaacgatgatagtaatagaaagtccatgaggtttgagatgaaattaccacgttttggcgttgaagaatggcttaatgtccatgaaaaggaagcaatctatgatattgcaggcgtttcaattgatgcgctgactttgcaagaattatttgacttggctggcgtttcgcaagaagagttttaccaagaattattaactaaaaagttaaattatggttggattgaaggctcacctgaatttaaaaaggcagttagtaatctctaccattcggtagcagaaagtcagattcttcagaccaatggggcaacgggagcgaatatgttggttttatatggattgattgaaccaaaagaccatgtgatttctatctatccgacttaccagcagttgtatgatattccaaaatcattgggagccgaagttgacctttggcaagtcaaagaggaaaataattggttgcctgatttagatgagttgcgccagctgattcgcccaaataccaaaatgatttgcattaataatgccaacaatccaacgggagctgttatggacgatgagtatttgcaagagttagttgcgattgcgaaatcgtgtggggcttatattttggcagatgaggtttatcgtccgtttacgactaaaaaagtttcttctattatagatttgtacgataagggaatctcggttaacagtctctcaaaaacattttcattacctggcattcgtgtcggctgggtagtagcttgtgatgaggtaactgatattttacgagattatcgggattacaccatgatttgtgcgggcgtctttgatgatatggtagccagtttagcacttgagcataaagaagctattttggcacgaaatcgccatattatcagagaaaatttggcaattcttgatcaatggattgcctcagaacctaaagcgtcttacattcgtcctgcagaagtaccgacatcttttgttaagcttgatgttaatgttccaatcgaagcattttgcttaacgttattgcaaaaatatggtgttttattggttccaggaaatcgttttgatagagaaggttatgttcgtttaggctattcttgccagcaagagacactaaaacagggcttgcagttattatcggcatgtttgaaagaattttaaggaaatcttgtaaaatacaaccgactgacaaactgaatttttattcaaaaactcgttgacgtattgcaaaaaaatagctaaaatagagataagtttaagagaaaagagaataaatatgaaaatcaaaaaaatatttttaggggttcttgcgcttatttctgtgctgacgttagctgcttgtggctcgtcatcaaatgaaaatttacaagaaaaaattgtcaaaaaagggaaattagtcgtggctatcagcccagactacgccccgtttgagttcaaggctttggttgatggcaaagataccattgttggtgctgatgtggaattggcgcaagctattgctgatgaacttggtgtcgagttagagctatcatcaatgagttttgataatgttctttcaagtcttcaaacaggaaaagctgacatggcaatctctggtttgtcttatactgaagaacgtgccaaagtgtatgacttttcagatgcctattatgagactgaaaatgctatcttagttaaagcgagtgatgttgatacctacacatcagttgagagtttgtcaggcttaaaagtggcagttcaaaaaggaacgattgaagaaaatttggcaaaagaccaactatcagattctaacattgtttcgttaacagctatgggtgaagccattaatgaattaaaatctggtcaagttcaagctgtcgatttggaaaaaccagtcgcagaaggttacctttcacaaaattctgacttagctctagcaagttttgctcttgaaacaggcgaaggtgacgccaaagcagtagctatgccaaaagatagcggcgaattggtaaaaacggttaacaaagtcatcaaaaaattagccaaagaagataaatacaaacaattcatttcagacgcagcacaacttacaggcgatgcggttgatgaagatgaataaaataaaagaggctgggacaaagtacccagcttctttgtttacatagcgattatttacaaggtgcagtggcttggacttcaataatctggtgatagattgttggaggtcgctgtcaagaaatattaaaccagcgattaccaactttactttcccatgcacaattgattagtcactttttgacgtagatttccaacctcaaagaattctcaattgtttgagcaatcaatcactgctgagtgggttctaatgtgctgataaaacaacttttacaacccttttttgacatcaagttgcgcttgacttcatttccaacctcaaaagcttccccaagcttttgagccatgcgggggtgagttataaaggttcggggaacttttataatcgggaaataaagcttacgaagtaagtgtcaaaaacgatcttggaatagaccgttttaggtcagcaacaagaaattaagatttgctgagaaatcaagtttctgcgaaactactgattcgccttttaatttttaggctcatgaataaagtctccactggagactttatttgtcccactcccttttatatcaccccccaaaaaacgaccaccgttggcagtcgttcttaggagattatgaaaaagaaagtttattaggattgtttatagtatagagggagaatcttaaagaaatcataaggtataaaatagattttgaatttaaaattctagctcaaaaaattcaagatatgcttaatattatcttgagtataaaatataggatcctcgtgtttagcagttgttatttttgtgaattgaatatcaatgccaggtaattgtgctagttgctcagcaaaatgaatcgattgtaaataaggtaccatgatatctttttctcctcccacttgaacaactgcttttaatttaaagtcgttaggaagaaaatctagataagttttccagtaactcttgtcacaggcagctttatcatgatagatattatcaacacccaaaaagtcactttcaaattttccttctccagcagtaggattatcgagagagcgatattcggattgcattgtgtaaaattcaacgggagcataaaagctaactaaaccattaacttgcgaagactggtcactattttctgaaacatcaccgtttaaagtaggtactgtcggggttagagctgtcattagtgctaagtaagctcctgcagattcaccccagatagtcatttggtttatgtcaatctggtattcttcactgtgggctttcaaataacgaacagcggctttgacatctgctaatgcggctggaaaaatggcgtcttgtgattttcgataatcaacagaagctactaagatgcctttagccagtgcctcgttgataatcggctgaattaatggcattttttggtcaccaaaagtgaatgcaccaccatgaactagaataattgcagggcactttttctcttgattttctggaaaataaatatccataacttgtttttcagattgcttagcgtaagcaactgtttttacacttaaaaccatattaattaaattcctttcttgagatgattataaaagtaaaacgtttccagtattataacatactccttgaaaaagatattattttagaattgattaacagtagatgcttagtttaaaaaatcttgagtgttctttttttaatgataagcataattgttgacgattgcttgaaaaaaaggcaaactattactaatttaaaacgcaaatcatatagaaaactaggaaaattatttatgaaatctatttctcaaattatgctgtatgtggaagatacagaaaaatgtgcgacattttgggtggaaaaaattggctttaccttaaaacaaacaatgcttggaccagctgaaacgacagcgtttgttcttgttccacaagctgattctgaaacagcaattgtattactgaataagaaggcagtagcagaatattctccagaagtgaatctcgaaacaccgtcgttgatgtttagttgtgatgatgtcaaacagactcgtgaaaatcttacaagacttggtgttgtagttggtgatattgttcaaattggaaacgtgttgacatgtactttctgtgatcttgaagggcattattttgctttctcagaatcaaaataatatcaaaaaacgaccaccattggcagtcgttcttaggagattatgaaaaagaaagtttattaggattgtctatagtatagagggagattcttaaaaaaatcataattatcatgccagaaaatttttaattataaaagtttacttgtagcataactgaaatcatttctttaaattgagatgttacaatgaccctgagttgaagcgtgatttagctcaaaatatgaacacagaggatatttcttatgtttactgagacttttaaaaatgttttaaatcatgagggtgttgtttcgataacgtcgtggggtgaagaaatgccgcatgttacgtgcacttggaattcttatcttgttttaaagggagataatcggatactcttgccagtagcggggatgcatagtacagaaaaggatttaaaggttaatccgaatcttattctgacatgtggtgctcgtcaagtagagggatttaacggctatcaagggacgggttttagaatattaggaacaggtagattgatcaatgagggtgctgaatttgacgaaatgaaaacaaaatttccatttttgcgaagtgtcttggaagtaaccgttacagaagcaaaacaattgctataataatcacacgtggtaaaagctgattggtgctgatttagttatcagttggcctttttgtcaaggttaccattttacgattttattttgaatatgatataatgaagaaattaatactattatcagtagtgcaacaacaaacaacacgcaacaggtggggtatacagttaaaccggaatgtagggtgatagattatgaagaaaatgcagattaataatcccaatggaagtattgcttactggaaatcagatgtctttgttttatccagagatactctgttctttcttcatggattgacagcagatcatacgatgtttgaacaacaatttttattttttgaaaatgattataatatcatcgcatgggatgcaccagcacagggggagtctcgcccttacgtctcttttacctatggtgaggctgcaaatgccataaaaacaatccttactgaatgtggtatatcgcaggttattctaatcggacagtctatgggcgggtatatctcgcaggcgttcataaggcaatatccagaaatggtgaaggcatttgtatccattgactcatcaccgtatggcaattactattcaaaatctgatatgtggtggctacatcaaattgagtggatggcaaaattattccctgagaaattattgaaatcatctattgtgaagcaaaatactatcacgaaatggggtcgagaaaatatggcaacaatgattgccaagtatgataaaacggagctgtgccatctcatgggaattggatatgcagggttcctagaagataatcaagaactgtctataccttgtccgacactcttgatagtaggtgaaaaggataccacaggtaaggtgaaagcctataacagagaatggtctaaaagaacaggatttcagttagtttggattgctgattctgcccataattccaatgttgataatcctgtaacagtgaataaacaaattgccgcttttcttaacactttgagataactgtcgaaatgccagaagcaagaaaaatacacactaaataacaaaaagacgaccgcatttctgcagtcgtcttttaggagattatgaaaaagaaaagttttaggattgtttatagtatagtgagggaaccttaaaaaaatcataagtgtgatagaaattttgctgaaaacattttttaaatttttatggcatttagcgcgtgtaaggattgactttttttgataaattaggtatcctagtagggaacgtgtaaatgttacaatatcttgaggaggtgaaacacatgtcaaaaacagtagtacgtaaaaacgaatcacttgacgatgcacttcgtcgtttcaaacgttctgtgactaaagctgggactcttcaagaatcacgtaagcgtgaattctacgaaaaaccttctgtaaaacgtaaacgcaaatcagaagcagctcgcaaacgtaaaaaattctaattaaatttagatacaagaaaagaggcgccaagcgtctctttttatgctctagattgaaaaattatttttctttcaacaaatcgcggatttctgtaagaagttcttcttgtgtaggtgcggcttcttcttccacttcatcttgttttttaccaaaagcagaagcagcgttagcagctttaacgatgaagaagagggttgtaccaacaattagaaaattaataacagcgcttaagaaactaccataggcaacaccatgccaagaaagttctgcaattttttccacaccagctgctttcaaagcagggttaaggaaaagtggagtgataacatcttcaacaagagatgttacaatagcgttgaaagctgcaccaataacaacagcgacagcaaggtcaaggacattggccttgaacaaaaactctttgagttctttaatcatagaaaaacctcctaattaaacgttaacagtatcattataccaaaaaaaacatacaaaaggcagctatctgcctaaaaatgtgaataaatctagtatttatttagagaaatattcaaaaaatgccattcttattcattaaacgttaatgttgagcttttcaaaaaaatactttttatattgaaaatgattctattgagattgaaaacgtcaagaaactaaagtgaaaaagggggattcaatttcctaaaatcattgcaactatttggagttttagatttacaaatgctgctcaaaatgttataatgaaatataaaactaaaatgggcttagtgcgtggaggtgatcttttggcaattgacaaagaattaatttccgagataaaaaatagcgttaatattgttgatgttattggcgaggtggttagtcttacacgtgctggtcgcaactatattggactttgtccatttcacaaggaaaaaacgccgtcttttaatgtcatagaagacaagcaattttttcattgttttggttgcggaaaatctggtgatgtttataagtttttggaagaatatcgtcaggttagctttttagagagtgttcatctggtagctgagcgcgctggaatccctttgcaagttgatgttcaacagacacaaacaaagccacaaaatcctaatcagatattgattgacattcataaagatgcggctaagttttacaatgctgttttaaagacgacaaaagaagggcaagaagcaaaaaactatctagcacaacgtggtttgacagatgagctgattgattattttaatattggattgtcgccaaacgaacctgattttttataccaatctctagcaaaacgctatgatgagaatgctttaatggcttcaggtctttttaatttgtccgaaagaacgaatcgtgtctatgatgcttttcaaaatcggattatgtttccattgaccgatgacagtggtcaggttgttgcattttcgggacggatttggaccaaagaggaccttgaaaataagcaagcgaagtataagaatactcgttccacagcgctgttcaataaatcgtatgaactttatcatttagataaagctcgtccagtaatgtcgaaaaagcatgaagtctatttgatggaaggttttatggacgttattgctgcctaccgtgctggtattgaaaacgctgtcgcttctatgggaacggcattgactccagaccatgttagacatctgaaacgttacgccaaaaaagtgattttgacttatgatggtgataacgctggtcaaaatgcgattgccaagtctttggaacttctaaaagactttaacgttgagattgtgcgtgttcctgagcaaatggaccctgatgaatttatccaaaaaaattcgccacaagctttggcaaatttgcttgagaataacaggataagtagtacagaattttttattcattacttgaaacctgaaaatggcgataatctccaagctgagattgcttatgtcgagcaaatttcaaaaattattgcgcaatcgccgtcaattacagcacaaaattcgtatattaatatggtggctgatttattgcctgactttgattactatcaagtcgagcaatcggtaaatagtgaacgtctgcaaaaccgctcaaatctgcaatcagaagcagttaaacaacgagtgactgttgtggaattacctatttccaagaatatatctgcaattatcaaagcagaaagtcagttaatgcaccgacttttgacacacgattatctcctcaatgaatttagaaatcgtggcgaatttacctttgatacccaagagttgcaagctttgtatgatttattagtgcagcaaggtgaggtgaattcctatgatttagcgcaatttgatgacccaacgcgccagatgtattatcgcgttttggaggaaaatttaccagatgaaattgcgaataatgaaatagaggaaattattgataagcgtgatcgtcttcttcgagaaagagatttgcaaaagcaaagcaaactcattcgtgagtctagcaatcttggagatgttgatgcagctttagcggctttggaaaatctcattgcccaaaaaagaaatatggaatagaggaaaatatggcaaaagaaaaagaaattacaacctttaatgttcaagttgcagaatttattcgtaatcataaaaagaacggaactgccgttgatgatgaagtaactgaaaaattagttattccattttcattagatgccgatcaaatagatgaccttttggaacgtttgacagatggtggtatttcaattacggacaaagaaggaaatccatcaacaaaatatgtcgttgaagaaccaaaaccagaagaattgacagacgaagaattacttggtagtaattctgccaaggttaatgacccagtgcgtatgtacctcaaagagattggtgtcgtgccattgctcactagcgaggaagaaaaagaattggctgttgccgttgctgctggtgaccttcaagcaaaacaacgtttggctgaagctaacttgcgtttggttgtttcaattgcaaaacgttatgttggacgtggtatgcaatttcttgaccttattcaagaaggaaacatgggcttgatgaaagctgttgataaatttgactactcaaaagggttcaaattctcaacttatgcgacatggtggattcgtcaggctatcacacgtgcaattgctgatcaagctcgtacgattcgtattcctgttcacatggttgaaactattaataaacttgttcgtgaacaacgtaacctccttcaagaacttggacaagacccaacgcctgaacaaattgcagagcgtatggatatgacgcctgacaaagttcgtgaaattttgaaaatcgctcaagaacctgtttcattggaaacaccaatcggtgaagaagatgacagtcaccttggtgatttcattgaagatgaagttattgaaaacccagtagattacacaactcgtgtcgtacttcgtgaacaattggacgaagttttggatacgttgacagaccgtgaagaaaatgtgttacgtttgcgttttggtcttgatgatggtaaaatgcgtacattagaagatgttggtaaagttttcaatgtgacgcgtgaacgtattcgtcaaattgaagccaaagctcttcgtaaactacgccacccaagtcgtagtaaacaactccgtgattttatcgaagattaattattaatgtgaggttcgcttatgtcagaacaaaaatatactgaagaagaagtagcaaaaatcaaagatcgtattcttgaagctttggaaatggttattgacccagaattgggcattgatattgtcaatctaggtcttgtctatgaaatacgctttgagcaaaatggtcatactgaaattgacatgacgttgacgacaatgggatgtccacttgctgatcttcttacagatcaaattcatgatgtgatgcgcgaaattccagaagtaacgaatactgaagtgaagctggtctggtatccagcttggacggtagataagatgagccgctacgctcgcattgctttaggaattagataactattaataaatatagcaccagcaatcgttagattgttggtctttttttacttgaaaaataaatgacatgttatggtaagagcgtgtaaatttttaaataagttgatgtagtggcttttaaaacgttgccatatcttgttgcaggataacatggtttgttacaaaaacagaaaattctggaattttaaccaaaaatactttacaacataaaagtatagtgttatattatctttcataaaatatgatttcctagcgtggagatatcttattttgcgattctgaaatatcagaaaattttatgaaaaggagagttcttgtatgggtaaaggtattggtaagttatttttaacagaagaaataagactaacgatttaagtcaaaacagctcacgagatgaggatgccgatagtttttatttatcacttgatagaaaatagttattttacaaagaatgttaatagatatatacttttattcatgaaataacttatcggtgattcggctattcatggtaatgatgctgttttttattataggttgttttaaatttagtcacacgagattgtggacgttttttgagaaaagaggtcattttatgaaaaagagttatttagtagcaggtgtcactcttctgtcgttggcggctttgcaagggtgttcaaattcaagttctgctaaaacagaaggtacaacgtattcttatgtatttgtagaagatccgacaacgcttgattacacggtgtcgggacgccacggaacatcacaaattacaacgcaaggtgtggatggtttgctagaaaatgacagatatggaaatttgattccatctcttgctaaggattggaaagtctcatcagatggtttgacatatacttacacactgcgcaagggtgttaaatggtacacctctgacggtgaagaatatgccgaagtaacagcagatgattttgtaacaggtctaaaacacgcagctgataaaaaatcaagcgcactatatattgttcaagattcgattaaaggcttgaatgattatgttgaaggaacaacgaaagacttttcagaagttggtatcaaagcagttgataaatacactgtccaatacactttaaaccaaccagaaagttattggaattcaaaaacaacctacggtattttgcaacctgttaatgcagactttttgaaatcaaaaggcgatgactttggttcagtggatccgtcaagcattctttacaacggtgcctttcttttgaaatctgttacttctaaatcttctatcgaatttgaaaagaatgaaaattattgggatgcggataaggtatccattgataatattaagttgacttacaatgacggttctgacccagaatcactctataaaaactttgataaaggaaattacactagggctcgtctttatccaacaaaatcaagttataaagctattgagaaaaaatataaagatgacattttctacatccctcaagaccagtcaacttactatatatccttcaatttgaatcgtaaagcttacgaatttacctcaaaagaaaatgactctcaaaaaacggacacacataaagcagttttaaataaagatttccgtcaagccattacctttgcttttgatagagcagcatggaattcacagggtgtcggtgaggaagcttcaactaaagcccttcgtaatctttttgtaccaccagaatttgtttctactaatggaacggagtttggagagcttgttacagaagaattggcaagtaactcaacttggagtgatgttgatttttcagacgctcaagacgggctttataacgttgataaagcgaaaacttcatttgaaaaagctaaaacggctcttgaagcagagggagtacaattcccgattcatctagatattgcagctgaacagactgatgagattggtagtcagagagtaagctctttgaaacaatctgttgaagcttcgcttgggacagataatattgtgattgacgttcaagcagaaagctctgatgactatgaacgaacaggttactacgctgaatcagctgaccaaaaagattatgacctttctgaagcatctggttggggtcctgactatgacgatccttcaacttatttggatgtctttaaatctgaaggagaacaatcagataagattggaattgatggagaaagtgatgaggacgtcgaaaaggttgtagggcttgataaatatactgaattagtaacagaagcagcggcaattacagatgatttagatgcacgttacaaagcctatgcgaaagcgcaagcttatttgacagatgaagcgattatgattcctattgtttctttaggggcatatccaactctttcaaaaattgtgccattttcaccatcatatgcgacttcaggaactaaaggtggttctgtttatgatagtggttcatataaatactatgaacttcaagatgagcctgtaacggctaaacaatatgaaaaagcattgaaaaaatggaaaaaagcaaaagaaaaatcaaatgctgaataccaagaaaaactttcagaacatattgaagactagcattttatgacataagagttttctcgattatggggaaactcttaatttggtaatggttggaggagttatgaaaaaatatattggaatgcgtgtcttacggtcgtttatatcgatttttttggtaacaacggtaacttatggcattatttattctttagtaccaaggcatcttatttttaagcaagaccccaattacaacaaaatggtaacaacacctgataagcgtattaattatgaaagtcttatttatagcaaaatgagctatattgactacatggatagtaaagacttgcagaagaaagcgtctaaaattgattctgaagtgacaacggctgttacaactaaaaataagaaaatttatcaaaaatacatcaaaagtattggtcgcaattggcaattatatcaatttccagaaagtaaaaaattctatgccgttcgcgatatccctttgtatgaacgtgttttccgtttttattcacatttgattgtgattgatcatccgtggaaaatcaaagattcttcaaatccaaatttaaaacgatacgttcgttttgaaaatgatcctgccattggtccagccttggttggctcgggcacggaacataaatatttgctttactttaatagcagttttccttacattcatcaaaatattataacaatgaatcttggaatttcttatccaagttatgctaatctacctattttacaagttattgggcaagggcaagggaaaacggaagcaagggaagtgactttcccaacggggaaaacgaagatgagttcgattgacatttattcgcgcacttataaatctcctaagaaagccgatgcgatggcgattgataattttggaaaaggtgatgcttatacagcaacgcgaaatcattattctgatccgtctatggtgtctaattcagtcagaatcggcattatcggtgttattatttcttatgcttttggtttgccaattgggcttttaatggcacgttttaaaaatggcttttttgaccgtttctcaactggtgtgacaacgttcttgttagctttaccaagtattgcgattatttatgcgattcgttttattggttcggcgctaggtttgccagattcgtttccggctttgggagcacatgattggcgttcatatgcccttcctgcctttatcttaggatttcttagcattccagggacagttgtttggttcagacgttacgtggttgatttgcaaaatagcgattttgtccgttttgcgcgtgcaaaagggttgtctgaaaatgaaatttcacgaaaacatttgtttaaacaagccatggttcctgttgttaatggtatccctgaagcgattttaggcacgattgttggagcgactttgacagagacaatctttgcttttcctgggatgggaaaaatgttgattgattccattaaagcgacaaacaatgctatggttgtcggtcttgttttcttatttacaagcttatctgttatttcacttttactgggtgatttgttaatggttatcttagatccacgcatcaagttagcttcgaaaggaggaaaaagatgacaagtgttgataaagaacagtttgagtttgtaacattggatagtgctgcttctgaaaccattgatgcgcctacttactcttattggaaatcagtctttaaacaattcttttcacgaaaatccactttctttatgttggctattttgattgcgattatcttaatgagttttgtttatccgctgtttgttcattgtgattttagcgacgttagtgacattaatgatttttcaaaacgttatgtttggccaaatagtcactattggtttggaacggataaggacggtcgttccttgtttgactgcgtgtggtacggtgctagaagttcgattctgatttcggtgattgcgacggtgttaaacatgattatcggagttgttattggtggtatctggggtatttcaaaaacagtagatgctatcatgattgaggtttataatgtgatttcaaatattcctcagttgctgattgttatggtgttgacttactctttaggtgctggtttttggaatatgattttagccttttgtatcacggggtggattggaattgcttattctatccgtgtgcaaatccttcgttatcgtgatttagaatataaccttgccagtcaaattttaggaacttcaaaagttaaaataattgtcaaaaatttgttgccacaattgatttctgttattgtgacaatggtttcacaattattgccgtcttacatttcttatgaagctttcctttcatattttggtattgggctaccaatcacagatccaagcttggggcgcttgatttcaaattattcatcaaacttaacctcgaatgcctatcttttttggattcctctaacaatactagtgctggtatcgttgccactatatatcgttggtcaaaaccttgcggatgctagtgatccaagaacacatagataggagagattatgacaaagaaaaatacaatcatcagtattcgtaatttggtcgtcaaattcagagtgcgtaaccgtcagttgactgcgattagaaatatttctctcgacctttatgaaggagaagttctggctgttgtgggcgaatctggaagtggtaagtctgttttaactaagactttcacaggaatgcttgaaagcaatggttatgtatcaaatggttctattttatatcgtgggcaagaattgactgacttaaaaacaaataaggagtgggaaaatatccgtggtgggaaaattgctacgattttccaagacccaatgacatcgcttgaccctattaaaacgattggtagtcagattgttgatgccattatcaaacatcaaaaagtttcaaaagcagaagctaaaacattagcgcttgattatatgaagaaagttggcatttctgatgttgaacgtcgatttaatgaatatccgttccaatattcgggtggcatgcgccagcgaattgtgattgcgattgcactggcatgtaagcctgatgtgttgatttgtgatgaaccaacaacagcattggatgttaccattcaggcgcaaattattgctctgctgaaaagtttgcaaaaagagtatcaatttacaactattttcattactcatgatttgggagtggtggctagtattgctgacaaggttgccgtgatgtacgcaggacaagttgttgagtatgcgacggttgaagaattgttttacaatcccaaacacccctatacgtggagtttgttatcaagtttgccgcaattagcggacgaagaaagtggtttgctcttttccattccaggagcaccaccatcactttatactgaaatcgacggtgatgcctttgcaccacgctcacattttgcaatgaaaattgatttcacaaaagagccgcctatttttaatgtctctgacacacactgggctaagacgtggctgcttcacccagatgcacccaaaattgataaaccagaagtgattcaagatttgcatcataagatttcacgaaaaatgttaagttaggagtaagggaatgtctgaaaaattagttgaaattcatgatttggaaatttccttcggtgaaggagacaaacgatttgtagctgtcaaaaatgcgaatttcttcattaacaaaggagagactttttcgctagtgggtgaatcaggaagtggaaaaacgaccattggtcgtgcaattgtcggtctaaatgaaaccagttcaggtgacattgtttacaatggcaaaaaaataaatggtaagaaatcaaaacgtgaaaaagaagaacttatccgaaaaattcaaatgatttttcaagatccagctgcaagtttgaatgaacgtgctaccattgattacattatttcagaagggttgtacaattttaaactgtttaaggatgaagaagagcgccaaaagaaagtaaaagagattattgaaaaagttggtttattaccagaacatttaacgcgctatccacacgagttttcaggtggtcaacgtcagcgtatcggaattgctagaacacttgttatgaatcctgaatttatcattgcagatgaaccgatttcggctcttgatgtttcagttagggcgcaggttctcaatcttttaaaacaaattcaacaagaaagtggtttaacctatctatttatcgctcatgatttatcagttgttcggtttatttctgatcgtattgcggttattcaccaaggagtaattgttgaagtggcagaaactgaggagctgttcaagcatcctatccacccttatactcaatcacttttatcagcgattccaattccagatcctattttggagcgccaaaaagaattaattatctacgacccagagcaacacgattacacaaccgacaaaccacaaatggttgaaattaaacccaatcacttcgtctgggcaaatcaagccgaaactgagaaatatcgagagaatggtgagtaaaactttttattaaagtgctaagtttgtcaaacaaggggttcttgtttctgaatagtgctttttctgaaaaaatagtgtaaaatagtagggaatgaatttaaaggagttctaacatgattttagttacaggtgccaatgggcaattaggaacagaattacgctatttattagatgaacgtggtgaagagtacgtggcggttgacgttgcggaaatggacatcacaaatgctgaaaaagttgatgaagtatttgcgcaagtaaaaccaacacttgtttaccattgtgcggcttatacagccgttgatgctgccgaagatgaaggtaaagaacttgactatgctatcaacgtaacaggtacagaaattgttgccaaagcagctgctaaatatggtgcaactcttgtttacatttcaactgactacgtttttgacggaaagaaaccagttggtcaagaatgggaagttgatgatacaccagaccctcaaacagaatacggacgtacaaaacgtctcggtgaagaagccgttgaaaaatacactgataaattctacatcatccgtacagcttgggtatttggtaattatggtaaaaactttgttttcacaatgcaaaaccttgccaaaacacatgacacattaactgttgtcaatgaccaacatggtcgtccaacatggactcgtactttggctgaatttatgacttatttgacagaaaatcaaaaagaatttggttattatcatttgtcaaatgatgccactgaagacacaacttggtatgatttcgcagtagaaatcttgaaagataccgatgttgtagtgaaaccagttgattcaagtcaattcccagctaaagcaaaacgtccacttaactcaacaatgagccttgctaaagctaaagcaactggttttgttattccaacatggcaagaagctttgcaagaattttacaaacaagacgttaaaaaataataactgtccgtcgcagtttcaaaacatgattatggggttaggagattttctaacctcatttttgattgtgacgccctaggtgcttttgtagtatttaaaaattgtacaattcatcacattctgtcgcttagactttccttttttctttcgccagcttatgtaaattatggtataataaaaacgattgtattttagaatggagaagtgtgccatgcaacatgtattcatcatcggaagtcgtggattaccagcaaaatacggtggtttcgagacttttgttgaggagttggtaaaaaataagcagagcgcagacattgtttatcatgtggcttgtttgagtgacgataagcatcaaacgcactttagctatgaaggcgcggattgttttaccatcaaggcacctaagattggtcctgctcgggtcatcgcttatgatatgatggctattaattatggacttcaaatggtaaaaaaagagcgcattgaacaccctattttttatattttgggtaacacgattggtgcttttatcgtgccttttgctaagaaaattcacgctgtcggtggtaaagtttttgtcaatcccgatggtttggaatggaaacgatctaaatggtcaaaacctgttcaagcttatttaaaatatgctgaaaaatcaatggctaaaacggctgatttagtgatttcagataatatcggtattgaaacttatattcaggagtcttatccagaagctaagacacggtttattgcttatggaaccgacttgacaaggtcaagcttgactgccgatgattacaaagttagaaaatgctttgaaaactggcaaacaaaggaaaatgggtattatctaattgtcggacgatttgttccagaaaataactacgaaacagcaatccgagaatttatgaaatcaaatactaagcgtgatttgattatcatttgtaaccataagaataacccttattttgacaaattgaaacggttgacaaattttgaaagagataaacgtgtgaagtttgttggaacagtttatgaccgtgatttgttaaattatatccgagaaaatgcatttgcctacattcatggacatgaagttggaggaacaaatccaggtctgcttgaagctctaggacatactaaacttaatcttgtccttgacgttgatttcaataaatcagtagctgacgcaagtgccttctattggaataaaacctctggtaatttatcatgtttgataaatgatgcagacggtcattatgattttacagaatatggaaaccgtgcccgtgcgattgttaaacaaaattacacatgggaaaaaatagtaggagagtatgaggaactgtttttaaatgaaaattaatattctcatgtccacctacaatggtgaacaatttttggctgagcagattgaaagtattcaaaaacaaacagtcaaagactggacattatatatccgagacgacggctctagcgaccgcacaccagaaattattcagcaatatgctcaaaaggattcacgtattatctttatcaatgctgataatcgtgaaaatttcggcgtcattaaaaacttttatacgcttttaaaacatagcaaagctgactattatttcttttctgaccaagatgacatctggttggaagataaattagcggtgactttagctgaagctgaaaaatatagcaatgacaaaccattgctcgtttatacggatttgaaaattgttgatagagagctaaatgttttgcatgaaagcatgattaaaacacagtctgaccatgccaatactaaactagttcaagaattaaccgaaaatacggtaactggtggaacagcgatgatcaatcatgctcttgccgagctttggacaacaacggataatctcttaatgcatgactggtatttagcattgattgctagtgccttgggacatttggtttacctcgattacccaacagaattgtatcgtcagcatgacgctaatgttcttggggcaagaacatggtccaaacggatgaaaaactggttaaaaccacataaactcgttgaaaaatattggtggttaattgatgccagtcaaacacaagcgcgttttctgctagacttaaatttatcaccagaaaacagagaattagttgaaaactttacaactattatggataaatcactgtctcagcgtatccacactttaaacaaatatggtttacgtaagaacagaaacttccatacgcttgtctttaaaacactaattattaccaaatttggttataggagaaataaatgaaattctttagtaaagaaaataaaatcttattaaaagagatggtaaaaacagattttaaacttcgttaccaaggaagtttaattgggcatttatggtcaatcttaaaaccattgatgctcttcacaatcatgtacttggtatttgttcagttcttgcgattcgatgatggaacgccacactatgctattggtttgttaattggtatggtgacatggaacttcttttctgaagcaactaatatggggatgatgtctatcgtatctcgaggtgatttattacgtaaattgaacttttcaaaagaaattattgttatttcatcagttgttggtgcggcaattaattatggtattaacttgattgttgtatttgtttttgcattagttaatggagtgacagtttctttcggttggttaactatcttccctctctttatagagttattcctattctcagcgggcatcgcctttgtacttgctactctgtttgtaaaatatagagatattggtcctatctgggaagtggtgatgcaagctggtatgtatgcgacaccgattatttattcacttacatttattttgcaacgtggtcaagtcacagtcgcaaaattgatgatgctaaatccattagcacaaattattcaagatatgcgtcactttatcgtattttcaggaaatatgcgtggttgggacttagttggtcataaagctattactatgattccttatattcttccattctttgtatttggaattggttattatattttccataaaaatgctaaaaaattcgcggagattttataatgtcagataaaaaaattgcagtaaaagttgatcatgttagtaagtattttaaattgccaacagaagcaactcaaagcttacgtacaaatttagttaattattttaaaggtataaaaggttatcgtgaacaacatgtcttaaaggatatcgactttgaagtagaagaaggagatttctttgggattgttggacgaaatggttcaggtaaatcaacccttttgaaaatcatttctcaaatttatgttcctgaaaaggggaaagtcactgtaaatggtaaaatggtatctttcattgaacttggtgtcggatttaatccagaactaacaggacgtgaaaatgtttatatgaacggtgccatgcttggatttacaactgaagaagtagatgccatgtatgatgatattgttgagtttgcggaacttgaagatttcatgaatcaaaaacttaagaactattcaagcgggatgcaagttcgtctagccttttcagtagctattaaggctcaaggtgacgtacttatccttgatgaagttcttgcagttggtgatgaagctttccaacgtaaatgtaatgattatttcctagagagaaaaacgagcggaaagactactattttagttacccatgacatgggtgctgttaagaaatattgtaataaagctattttgattgaggatggttatatcaaagcacaaggtgagccagacgaggtagctaaccaatatagctatgataatgctaatactgaaaaaaatgacgatggaaaaactgttgaaaaattagttgttgataatttagaagttagtctactttcttctggtcaaactacaccagataagccaattgagttcagtatcagttataatgttctcgaagatttagagacatatgtagcattttcacttacagatattgaccgtaatatttggatttataacgataattctatggaatacctttcaagtggaaaaggttataaacatgctacgtattcttgtttattaaataatgtaaacaatctaaaattaaaacttgaggtctctataagagataaaaatggtaaaatgttagcttttgctaactcaagtaatacaaatgttattcttgttagtcgtaatgatttagcactagatgataaatcaggtagagattcggctacaggtttaattcaaagaaatggcacttggaaatttaaatgatggatgctttagttagtattgttgtaacttgttacaaccacgaatcttatgtaaaagattgtcttgagagtatatttcagcagacatataaaaatattgagctattggtttttaatgatgggtcattagacgattctgatactgttattaaagatacgctaagtttgagtccttttgaaaatactcagtatttttatcatgagaataaaggagtcgttcttaccagaaatattgctttagagcatgtttcaggagattaccttgtttttgttgatagtgatgatactttaaaaaaggattatattcgtttattagttgaaactgcagaaaaagaagatgcggatatagtttattctgcactctatgaattgaattctggagaggttgttttacctattaaagagtatgatttacaagaaatgtttattggtaatttcatacatgcttcaagtttaataagaacatcagcaattggaaatattaaatttgatgagcagttgaatcgtgaaaaattagaggactacgacttctatttaaatcttgtgacaagcaaggaattaaaagtagttccttgttatgcaactggattaaattatcgtgtgtcatttgattcaagaagtagccatcaaaatctaaagtcatattacaaaacgtatggatatataattgggaaatatctgactcgattccctaattatgtaaaagaggcattagattatcattttgaacgcttaacgagtttagatattgaacactctattaaagaagaaaaaatatcgatttatttttctgagaatgaggcattttcggatattccagattatcagaatcaaatacaatttcaagatgaaattgaaattcctgtagtaaaaggtaagaattatatcagaataagaccttctaatattccaagtttctatgaattttttgttttaaaatcgaaggaatatcagactgagattcttccaataatgtcaaatggtttaatcgatgaaaatagtgtagtttttgaggatttctatcctttccttgattatcaatttactctttcagaaggtgataagctagtgttgagctataaacgctataatatcaatgacattgttgctaaagattatattggaaaattgcttgcgaagcaaaaatataatcgtttacaaactattctatcgtatgagcagaaacaaagacaatttgaaagtgaacttaatcaaaaaacacaggaattcgatgacttaagtaaggagtataacactttgctatctaactatcgttctataacaaactcaatatggtggaaaataccaactaaaattattaatttctttaggagaaaaaaatgaaacgcttactcttatatgttcatttcaataaatataataaaattagtgagcatgtctattatcaactagaacatatgcaccctctcttttcaaaagtaatctttatttcaaatagtcaacttgatgagggtgaagttgataaattacgtcaaagtcaattaattgatgcttttatacaacgtgaaaatattggatacgattttgcagcatggcatgacggtatggcttttgaaggttttgaaaacttaaaagcttatgattcagtaactgcaatgaatgatacttgctttggaccactttgggatatggctcctgtatatgataagtatgaatcagatgaaaaagttgacttttggggaatgacaaatcatagagcgattgatgcgggtcatatttatattgatgaacatttacaatcatattttatgtcttttaagaaaagtattgtaatttctgaagtttttcaagagttttggaagtctgttgaagcatatacagatgttcaaaaagttattgataattatgaaacgaaatatactaagcgttttgttgatgctggttttcgttatgcttctgtattgaatacagtaccaattgcagataattttttccattctaattttacaattcattatccacatgtgcttttagataatcatgttccttttataaaaataaaaacttttgatttgacacaacatttagcaccttatttgttgaaagaaattgaaaaagtctctaattatccaacgaaattaattttagatcatatgtcggatataagtcttcctaccccaccttatttgttagatcgtaaagtacttaaggtagttgaaaaagaatattcaaatactaaaaaagtagcagttcatcttcatactttttacgttgatttgttagaggaatttttgaatcaatttgagaatttccattttgactatgacttgtttttgacaactgatacagaagctaaaaaagcagagattgagtctatccttgagaaaaatggtaaaatagctcaagtctttctaacaggaaatcggggtcgtgatattattccaatgttaaaattgaaagaagaattatcttcatatgattatattgggcattttcataccaaaaaatctccagaatatccttattgggtaggggattcatggagaaatgaactttatcagatgttaattcaatctgctgataatatcttagctaatctagaaaataacgataatcttggacttgttattgctgatatcccatccttctttagatatactaaaatagttgatccttggaacgaaaatcgatttgctgatggtatgaatgaactttgggaacgtatgaatctcgggcgacaaattgattttaataacttgagtacgtttatcatgagctatggaacttttatttggttcaaacgtgatacacttaaaccactatttgatttagagttgacggacgatgaaataccatcagaaccaattccacaacatacaattttgcattcaattgaacgtatcctggtttatcttgcatgggcaaataattatgattatgccattgctaaaaacgatatctatataacaccatttgtggataatgtggtgtttaacattcgtccgaatacaatgcctaacacctacgtgaactttgacaacattggtggtattaaaggagcacttaagtatatttaccgtggtccaggtagtgctattaaatatattatcaagaggatggtactgaaatttaaatcatgatgaaaaagtttttgaaaagttttgattgggttaatcttctaaggatagttttattaattatttttctgttttacatcaatttttatttagtaaattcttatgtacttaaaggggcaacaagtgatttgtctttagggtttcaatcaagcttacactttagcttgattgcctatattttatctattgttgggataagtttttaccttgttaaggatctgagtaaaacattctttataaagttagtttctggatattttatttatcagattgtttcctattttattttagtaacaagaaatttaaataatgaaaaatttaaagtatgggatttgattaaaaatcatttttttcaaccgaattttcttgttacacttttgattattataggtatttcaggagtactatattttttaattcaaaaaaataggtatcttgcatttattgaagattatcttcaggattatgattctaaaaacacaattctttttggatttttagcatcttttgtcgttaatgatagacagatgctaaagattttcaaagaattagtatcctcttatctttctgataatgattatgttcactttataattcacttatctagcaatcttgctttaactttaatggttatgggagtggtgtcttattttgtgattaatgcttatcaagcaattgttacaaattctcctactccatcattgatgataacggtaagctttgcattagcaactatttttaattatacgttacagctaggagttagaagtgatgaaacattactagataaatttatttttccaggagcaacagcttatcaaattattgctttaacatgtctctttttaattatctatcttgtatttaatcgctttttatctgcaactttccttattattgtaactggagtgattatatctgttgttaatagtattaaggaaggtctgcgaagtgaacctcttcttattacagactttgtttggttaaaagagatttcgttgttaactagttttgtcgataaaagtgttattatttatattgtgcttggtgtcattgcgacacttggtgtctatattctgttaaggaaacgtattttacctggaaaaatttttaacattaaaagattacgattctccttcttaggagcgttaattggtcttggagttttcaattttattgtctttagaaatgaaacagattctaaaattattgataatatccccgttgtttccaaggttaataattgggttgatattaattggatgggattttcgactaatgctagctataaatcgttgacatatgtttggacaaagcaattaacaaaatcggtaatggaaactcctgatgggtatagcgaagagaaaattaaagagcttgcggaaaagtatcgtaatgaagcttcaataattaatgcttctagagctaataaaattgaagaccaaacagtcatctttattttaagtgaaagtttttcagacccgagtcgtgttccaggtgttactttatctgaaaatattattccaaatattacccaaataaaagatgaatatacaagtggtttgatgatatcagatttttatggtggtggtacagctaacatggaaattcaggctttgacaggtttatcttattctaatttatcgcctagcgtttctgttatgaatactgaggtacttcctaaaatgtcgtatattccttctataagtgatagttatactgatgacgaaaaaattgcagtacatcttcataatggtgcaaattattctcgaaatattgtttataaagatttaggatttgacacttttatagctttggatggtactgacgataagccgacacaattagagtatctcagtgcaggggctagagatagctcaacttactacgctgtcacaagtaacttatcatcagatacaagccaatttttctcagttatcaccatgcaaaaccatattccttgggaagcagaggagccagcagagattactgcttatggagaaggattatcagatgaggagaatgaaagtttaactagctatgctagacttttaaacattactgattcagcaactgccgactttcttaacgagttatctggttatgacaaaaaaataacagttgttttttatggcgatcatttgccaggattgtatcctacaagtatattctcaagtgatcctttaaatcaatatgaaactgattattttatttggagtaactatgaaacagaaaaactatcttatccatctgttaattcaagtgatttcccagcactcgtactaaaacaaacagattcaaaagtttctccttactatgctttattaactgatattctagaagctgaaaatcaatcttctgacgatttagaagctctatcaatggatttacagatgttgcagtatgaccttacattaggaaagagttatataacaaaagtggatgagaaattttttgagactgaataattaaactactggagtttttatgaaaaataaagttaatgattttgttaatttgaataagcaaaaaatatttataatttttgtattgtattgcgtttctgcttgttcaataggtgtagttaattatccttatatagatgatattgctcgacgtattgaaggagttggaaactttgcagctcattactcacgctatttaagtgaatttgcttcgtatatcgttcaaggaagtcatcatttaacagatacaggtttgaccacttttgtggtaagtgcaattattttaacacttacaagcgtagtcgttttatatgttatgtttgatggcgagcaaatttcgtgggtttcagcaatgggttcagtttttataggtataaatccatggtttttggaaccaattagttttagatttgacgcaccttatatttgtctttctgtattggtatcagttattccatttcttttcttttattcaaaaaaaagaaactattttcttttatcaattattggaatttttttgatgtgtaattcttatcaaggctcttcaggaatttatattataatgttattaacattactttatcgtgattttttgaagggcgttgagatatccgaactcttaaaaaaacttttaataagtgctttagcctatgtgatttcaatgggagtatacctcttagaaacgaaattgaaccccgaattagcattacgtggtgatacaactagtatagcacctttgaaggatatgccagctgcagtttttaataatcttagagtgtattttataactttaaaaagccaaagtaccaatgcttggttatatcttgctattgtattatttataatgttttttgtttatatgacgtatagtagcaagattaataaattaatatcaagtatttttggaattatatatattgctcttggttctattttgagttttggagtttatatgttcttttcaactccacttgcagacgatcgccccagatatgaatatggttttgcatattttattgctattatcatgattctgttaggaagttattctagcaataaggtgattgattatgttaaaggtttagtagtagttttattagtgtattactctgtatcgtttgcatttatatatgccagtgccttagataatcagaaagaagcatttgaagatagtgcagttatgttagccgaagatttaaatgattatgttacagctgataatcaaacagtatatattagttcaatgtttaaggattctccagcttatcttaatactctaaaaacatatcctatactggatgatttaatcccaagcaatagtaatctttattggccaaatttactgtggtttaatactttaacaaatttaaatgtcaatctagttggttttgattttaatacaattgatatgaacactttggagttgctcgagtcaaataaattatgggatatttaccaattgaacggggaaatttatgtctatactaaataatattgaaaatagttagctacttgttatagtgtaattttatttaccgttggactattgctatatattctgttgtaagttattcataaattcacagtttgcatatcttagagaggttattatgaaaaaactatctatcgttgttccttgttacaatgagcaagaaacaatttacccatttttggaagaaactcaaaaagtcgagcaaaagttaaaaaatcatttggtatttgattatatttttgttaatgacggttcaaaagatgagacattaaacgtattgcgtgatgttgcaagtcgttttcctaacgttcattatctatctttctcacgtaactttgggaaagaagcagggcttttggcagggcttgaggctgctgatggtgatttaatcactgttatggatgcggatttacaagatccacctgagcttttgattaatatgtatcaaaagattttagagggctatgatgttgttggaacacgtcgtgccgaccgtaaaggtgaacctgttattcgttctttcttttctaagatgttttataaaataataaatgctgtttcagatactgaaatggtagatggtgcgcgtgatttccgcctgatgactagacaagttgttgatagcattttagaacttggtgaagtcaatcgtttttcaaagggaattttctcatgggttggttacgatgtgacttacattgcttatgaaaatcgtgagcgtgtcgctggtgaaacgtcatggaacttttggagtttattaaaatactcaatggaagggttcatcaacttttctgaagcgccattgaatctttctttgtgggctggtgcggtatcatttttagcatcaattttaggaattttatttattattgttcgaaaattgactatcggtggaagcgtcactggttgggctagtctagtttgtatcatcttgttcattggtggtatccaactgcttgctctcggaatcattggaaaatacatttccaaaattttccttgaaaccaaaaaacgcccagtttacatcgtaaaagaaaaagggtaaactatcttgactattttaagagatagcaattatttataaaggggttttaggaaatttatgttaaagaaatgccatgatgtaatcatcaatttacttcatgcttggtcactgcttttatttacgctaattactttaattagtttattttatcgaacttttatcccaagatattcagaattggctgaaataaagcaaaatcgcttgtttcttctaattctttttcttgctcttgggatattttattttgtaatagccaatctaagaaagagtagtgcaaaaaggatcttttttctaggagtacttgcatacactatttttgctatttatttgtttctttcggtgtcgggaattttaagaaatgatgctgtagcggtatatgatgctgctcgtggtttaaataatggtgattttagttatttggaaataaattcttatttgtatcgattccctcatcaattaggtttagtgacctatgaaagaattattttagcacttacaggtgcaaaaaatgctaagattttctttcttttgaattttattatgattattgctattaactatttaaactggagaataacgaaaaaactctttgataatgaagaaatttcaaaaatatcaattgtaatatcgtttatatttttaccacagtttttttcgatactttttgtgtatggattagtacctggtttatttttttccatgatagcaatatattgtttaatcgcttattttgagaaaagacagttaagatttttggctggcttaatcatcgcactcatttgtgcaacggttattagaaataactatattattttggttgttacgataagcattattttaattctggatgcaattaatcataaagcttttccctcttttttaggaataatcgttttatttacaatgctttctgcagctaataccagtatcaatactcactataaaaatttatcaaacggaagtgatatttctggcacaccacatatcgcttggattgcaatgggattagatgataatccaaaatctcctcgcttaccaggctggtacgatgaatcaatagataatgtgtatgtagaaaacaaaggagactttgaaaaaattaaaattttaagtcaatataaggttaaagaacgcttggattatttaactggtcaccctaagtatgcatgggatttctttgcaacaaaagttctttcaacttggacagaaggtttatttcaaagtatctggtcaggcccagctccagctcttaaccaaggagtgaggacttttctttggaaaagtgtatataatggaaagtttttctataaattcttttcactttttagtactgcaatactgtttttgatttattttggaagtttagtatttctattttatttagttggttcacaaaaagtagtaaattctcttattttttatccatatatttatttttcaggaggcttcctttttcatctcatttgggaaactaaaagtcaatacgcttacccttatattgtattattatttcccgtcgctgcatttggtctatttaaatttccacaactgaagaaaacagttctttggaagagagtagttcaaaaactaagattagttttattttctttaagtgatactattgagaatgcgaaattaaataaataattttatatttttcacagattttatagctgtttttccgaattatatagtgtaaacacattatacaaagaaggagaacagctttttgagtaaacttaaaacagctttattgtcaacagttgtactaggtgcgacttgtctttcacatcccgtttttgctgatcagcaagggaatgccattgtttctaaaactaattttgattctgcaagtaaaacatttgaagttacagcgcagcagtcagataacggaaaagcaatcaaagggattaatgttgctatttggtctgaagaaaatggtcaagatgatttgaagtggtacacaaattcaaatgtatcaggggggcaagtcaaggttcaatttaatttagcaaatcatggtaatcgtgcaggaaattacatcacgcatgtttatacaaattacacggacggtagttgttcaggagttgctttggagaatactaagattaacccgaaagcaccgcaactttctgtaaaaaatggtgctatccaaatgacaacagatatttatgcaccatcaaatggtcagattaaatatgcagtttggtctgaggagaatgatcaagatgatttaagatggtatgaagatagtggtaaaggaattacgcaagcagatttgaaaaatcatagcggatatggaagatattttgttcatacttatttatctcaaggtgggaaaatgattggaattaatggtcaagacattgtcattaataaacaagaagtttcgtatcagattaacaaagttaacgatacaacttacgatgtattagtaactaatgtgccagaatacattacttctatcgctgtacctacttggtctaacgcaaatggtcaagatgatataaaatggtacactactactaaagtagataatgggacatataaagcgcaaatcaatttagcaaatcatggttatgcatcaggagactatagtgtccatatctatggtcaaaatgcgattactaataactttgaaggattgaaaggaacttcaggttttagagcagacaatgttccaaatcagaatactaccccaacccctcgtatcacgacttacatcaatgaaacgaatacttaccctgttggtcagtgtacttgggcggtgaaatcattagcgccatggattccgaattggcttggaaatgctggcggctgggccacaaatgccaaagctaagggatttaggactggctcaacgccacgtgtggggtcgattgcagtttggccaaatgatggtggcggttatggtcacgtagcttatgtgacagatgtagcaagtaatacacgtattcaagttaaagaatctaattacgctggaaatcaatacatagcgaatttccgtggttggtttaatccacttgattcattttggggtggaagtgtaacctatatttatccagattaatcataaggcggcgattttgaaatcgctgccttgtttgttatactgcatttgtatgcgcttgaatgacatgaagattcatgttacaatgatgaaaaggaagtaagaagaggaggaatgcatttgaaaaagaatgtcctgcgaagttgtcttttatcgccagtgattatcggagcttttctaagttcaagtttagttttggcagatgaaaatacaacgatttctacaacagctgagaatgttcagacagagcaagtttcatcgacgacagaaaacactgttgcagatacatctgtatctgaagtggaacaagcaacggaatcgtcatctgaacagtcacttgtagaagatagcgataacgaaacaacggtttctgaaaataattcttcaatagattcagcaactatagacacaacagatgcgacagtagtagctaatgagtcagcattgtctgatacgtctgataatcttggtgccaatataaaagcagaagaagtcagcgaggattctcaaacagcagaagtagcagaaacaagcactacaactactggcgctgtggatgaagaagttacggaagatgacaatgagactgaaactttgaccgtgaatactgatactgtttctgaagtcaatacagcaagtcttgcgacgtcattggtgcaatcaacagcaaagaaagtgacttcaacccagactcaaaaatcattagtagaggcttctgtttctggaaatacgctttccattcaatataatggaactatcacagcaggagaatctctaaaatttgcggtttggtctgacaataatgaccaagatgatttggtttggtatgatgcagatgcttctggtgcggcttatatcgatttatcaaatcataaagattacggtatttacaatattcacacctattctttcaaaaatggtcaaactactggtttgaatgctatgactgtaacggtggcacggccagaagtcacaacaaatattacacaaacgagcaatggcaatttcaccattacaattagcaatgtgcctgacagcattactagtattttagtacctgtttggtctgataacaatggtcaagatgacatcaaatggtattctgccacacaaactgggacaggaacttatcaagctacggtttcagttgccaatcataatagtgacaatggtcattatagcgcccatatttatggacaaagcagtatcacaggtggcttaattggtttggcagtaacatctggttttgataatgtagatactcgtcctaatgctacggtttcagttgttaattatgctgaggacaaaacaacatttgatgtcgttgtcactggtagctctgcaacaaaaacaatcaaatcagttgctatcgctgtctggtcagaggataaagggcaggacgatcttatctggtacacaccaacgattaccaataattctgcgcgtgtaacgattgatattgctaatcattctaacacatcagatatttacaatgttcacgtttatactgactacgctgacggtacacgtgtggggcaagttttgggagcttatcaaattacaaaaccaacgcctaaaaacgatgtgacggcaaccctgacaagtgatggtattgctttaacattggattctaataccgtaacggattatagcaaggttaaatttgcggtttggtcagatgacgaaggtcaagatgatttggtttggtacgatgcaagttctgctggaacagctttagcatcatatgaaaatcattcaggatatggaacttatcatattcacacgtattcatttgaaacaggtaaagctgttggtttgaatgcgacagatattgttattgaaaagccaaatgttcaaacaactattaccaaagttgatgacaatacctacaaagtcacggtgacaaatgtgccaatttatatcaaatcagtatctttaccagtttggagtatggtaaacggtcaagatgatattgattggttaactgcgactaaagaagattcatcaacttatactggtaccatttcattgaaagatcatcattatgattcaggtgactacaatgttcacgtttatgggcaaagcaaactcggcaatcagtttatcggcttagctgtaaccaaaggttttacagttacagaaacaagtgcaacagcaccaacaataactgtttcaaattatgataaagatagtggagtattgactgttacagtctctgagacaagcacaagtaagcaattgaaattcattcgtgtagcggcttggtcagaaagtgatcaatctaacctttactggtacacaacatcaaatattactaatggcacagcaagcttaacagtagatgaaaagtatcatgattacatcaaaggtgattatacggtgcatgtctatgttgattttagtgatgggacaacatcaggttataatctaggtagctatacttttaatgcagaccaacctgttcagcaagaatcgtcatatttcattgacatcagtagtcataatggcgttatttcagttagtgaattcctatcgttgaagagtcaaggaattacaggtgtggttgttaaattgacagaaggaacaagttataccaatccatatgcaagttctcaaattagcaacgcacaagcagctggtttgaaagtttcagcttatcattattcacattatgaaacggctgcggaagctaaagccgaagcgcaatactttgtttcggttgcaaaatcattagggctttcaagttcaacagttatggttaatgatatggaatcttcagaaatgctaaatggagatattaatgctaacacgcaagcttggaaagaagaaatgactcgccttggttatagtgatttggtttactatacaatggcaagttggttggatatcaagggcggaaaagttagcacatcaacatttggcatgtctaatttctgggtagctcactatgtttatggatacacctatttagaccaagaaacggctaaatcccttgcttattattcatcagcagcggcatggcaatatacaagtgtatcacctaaattatcacatgctttagatgaaaacattgattatactggtcgcttcacatggtaaaggaggttaccaatgaaaaagaaattgagatgttacctaaccttacttttgtctttaggattgctagcggcgtgttctacgcattcgcaaaataataccaatcagagttcttcgtcaactaccgtaagtagtagtgttaagaaatcgacaaattcaagtgagacaagtacatcatcaactggttcatctgaatcagaagaagcatcatcaacagaaagttcatcatcaacagaagttacgttagctccaattaatacaggtgctattttgaaagcagactattcaacaatggctggaacgtggcagaatgcttctggggaaactttgacgtttaatgatgcaggattggcaacagaagggttaacggctgattttctggatattgatcaaaatggaatcttactcttagatgttcaaacagggtcaaaaacaaatgtgacactttacattgtacctgctaatactagcttttctagtgattatttgaacggacaaagtgataattctgaggtatcaaaagaccgtattatttcttctgccgatattagttctggagatatcgctaacaaagcttattatcatgtatcagaataaaagtcttaaattttaaaacgaactcgtttattaattttatgactcgttaaaaaacagtccactggactgtttttttatgctataatggtaatgaaaaaaatagaggtgaataatgtcttacgaaaatttattaaatcgttttttaagttacgtgaaagtgaatacgcgtagtaatcctgatagtactacaacaccttcaactcagactcaagttgactttgcattaaacgttttgaagcctgagatggaggcggttggtttgcaagatgtgcactatttgacaaatggctatcttgttggtactttaccagctaacgattcaacaaaaacacgaaaaattggttttatcgcacacatggatacggctgattttaacgctgaaggtatcaagccacaagttattgaaaattatgcaggtggcgctattgaacttggtcaatctggttatgtcctcaacccagaagaatttccaaatttaaataactaccttggtcaaaccttggtaacaactgacggaacaacccttcttggttctgatgataaatcaggtatcgctgaaatcatgacagccgttgaatacttggtagctcatcctgaaatcaaacatggtgagattcgtgttggttttggtcctgacgaagaaatcggtgtcggtgctgataaattcgatgttgatgatttcaacgttgactttgcttacacggtcgatggtggaccacttggcgaaattcaatacgaaacatttagtgcagctgctttggaagttgatttcatgggacgtaacgttcacccaggaacagctaaaaatcaaatgattaacgctttgcaactagcgattgatttccataaccaactaccagaaaatgaacgtcctgaaaatacagaaggctatgaaggatttttccatttacatggtatggaaggtactgtggaaaaagcgcacagctcatatattatccgtgattttgaagacgactcatttgaaaatcgtaaaaaattggttcaagaaatcgctgataagatgaatgctgaattaggtaaagaaagtgttattgtcaatcttcatgaccaatactacaatatgaagaaaatcattgaaaaagacatgacaccagttgaacttgctaaagaagtcatggaagatttggaaatcaagccagttatcgagccaattcgtggcggaacagatggttcaaaaatctcatttatgggaattcctacaccaaacctatttgcaggtggtgaaaatatgcatggtcgctttgaatttgtcagtcttcaaacaatggaaaaagctgtggatgttattatcggtattgtccaaaaataaccttaagctttacataagtattgtttgttagaatagactaatggaggactgttatgattaaaatctttggaaagatgcgatatcattggcaacctgagttatcttggtcaattatctattggtcaattgctgtagcgccaatgtttatcggcttatcattactgtttgagcggacaaaaataccaagtcaattttttatcttatttgctatctttattgtgctggttggtcttggttttcatcggtatttcgttatcgaagaaaatggaagattacggattgtttctttgaatccttttaaaaaatcaagcgtagcgattgcgcagattaaaaagattgaagtcaacaaatctggtattatcataaaaatcaaaaatcagccagaccgtattttttatatgagaaaatggcctaagaaatactttttagatgctttggcagttcatcctgactttcttggcgaagtagaattgatagacaattttatcaagctggattactttgaagcttacaaggctaacaaaaaagctcctacaaaatcgtaagagcctttgttgggcaagatttgatagcagtgagggtgtcttgatctgagttaggaacaactttttctaaaacctcagaatcagcaaattttacgataccgtcatcatggtaatcaaaaagtttagaatatgtctggcataggccgcaagcaatacatttttcgggaattattgatactttcatagtattattgtaatatgaattgatttatttaacaaggggacattatggcaaaacaaccgtgggaagaaaaagtagtcgatgacaacgaaattaaaatcagccgtaaaacaaaaggctctgctattagtacgcctttgttgacagcgttgcttagtattttctttgtcattgtggttgcgattttgtttgttgttttttacacttcaaatcgtggtagtgataaagcatcagaaacatcgaatttttatggtgcatcatcatctagcgttgtttcttcgtcgtcagaagcgtcatcatcagagacaactgctgaaacaacgactgatgagtcttcaacagatgcaagttcagatgatacaactgaatcttcaagctctactggtagcggcgacactattactgttttatcaggagaaggtgcagcttctattgcagcacgtgcaggcatttcagttgaaacactctatgagcttaaccctgaccacatgacatcgggttattggtatgctaacccaggagatgaagtttatattaattaggaagaaaaggaaatcatgaaatcaattagaattgcgattgatggtcctgcttcaagtggaaagagtacagtagccaagattattgctaaaaatcttggctatacttatcttgatactggagcaatgtatcgttcagcaacttatctagctttgcaaaatggattaacagaaaacaacgttcaagaaattttagaagctttgtctaagcactctatttcttttggacgtgccgaagatggtagtcaaactgtttttgttggtgacaaagatgtgacacttgctatccgccaaaatgatgtgacaaacaacgtttcttgggtggcagctataccagaagttcgcgaagaactggttgagcaacaacgtcgcattgctaaaaatggcgctatcatcatggatggtcgtgacattggaacggttgttttaccagatgcagaattgaaaattttcttgattgcgtcggtagaagaacgagcagaacgtcgttttaaagaaaaccaagaaaaaggtattgaaacggattttgaaacattgaagcgtgaaattgcagaacgtgattacaaagacagtcatcgtaaagtttcaccgttgaaagctgctgctgatgccattacttttgatacaactggtgttgatatcgacggtgttgtcaaatttattcaagaaaaagcagaaaaaatcattgacatgggttagtctctgtgatagaatagagacaatgagaaaagcagaagtgagaacttctcgccttgcgactaaggttgtctggcccaacatgtcaaagattcctccaggaatactatgtatgtacgggcttggtttgtcaagtccgtttttgtttttctctaaaaaaataaagaggtgaaaatcatagctaagaaagatctattcattaacgatgaaatccgcgttcgcgaagttcgtctcgttggtcttgatggtgaacaactaggaattaaaccattatcagaagcacaagctattgctgatgacgctaatgttgacttggttttaattcagccacaagctacgccacctgttgcaaaaattatggactatggaaagttcaaatttgagtatcaaaagaaacgtaaggaacaacgtaaaaaacaaagcgttgtgactgttaaagaagttcgtcttagcccagttatcgataaaggtgactttgagactaaacttcgtaacggccgtaaattccttgaaaaaggaaacaaagtgaaagtctcaattcgctttagaggtcgtatgattactcacaaggaaattggagcaaaggtattggcggaatttgcagaaagaacgcaagatattgctattattgagcaacgagctaagatggatggacgtcaaatgttcatgcaacttgctccaattcctgacaaaaaataattgtcaattttaaatattttaagaggagaattctaaaatgccaaaacaaaaaactcaccgcgcatcagctaaacgtttcaaacgtacaggttctggtggattgaaacgcttccgtgcgtttacttcacaccgtttccacggtaaaactaaaaaacaacgtcgtcatcttcgcaaagccgctatggtgcactcaggagatttcaaacgtattaaagcaatgctttcaggtcttaaataagaataaagcatttactcaatattattaagaattatttggaggagaatataaatggctcgtgttaaaggtggcgttgtatcacgcaaacgtcgtaaacgtgtattgaaacttgctaaaggttactatggtgcaaaacatatcttgttccgtactgcaaaagaacaagtaatgaactcttactactatgcataccgtgaccgtcgtcagaaaaaacgtgatttccgtaaactttggatcacacgtatcaatgcagcagctcgtatgaatggtttgtcatactcacaattgatgcacggtttgaaattagctgaaatcgaagttaaccgtaaaatgcttgctgatttagcagttaacgatgcagcagctttcacagctcttgcagatgcagctaaagctaaacttggtaaataagaattaaaacaaacgtaagttctacttacaatcaattaagagtgctaagcttacagcttagtgcttttttgtattcaaatagaataaaacatgtgaactatttatatcgttacctggtgcgctatgatttagacgttaagaattttgaaatagcgtgttcgggattaccgtcgaaaaacggtgataagatattgttggcaagacaggatttattatttacttgtgagttcgattttgggtctgctagagaaattagaatgtaacttcgacttggaaggtgatcataggagtactaagaaaaggattattttcacttattggtataaggcaaaaaacaaccaatcactaaatgtaatagtgattggttgttttgattatgttaattatgggttaggagccgtcacttgaacttgatgacgatgaactgctgctagagctcgatgagctactgtgcagttgcatatagcttggagctttaaagaggtcaacggtagattggttaccattttcgctatacaagcttgtcgattcatcacctagttttttctctatcgatttcaggctcttcaaggagtcggagtaggaaatcgacgaactatcaacggtttctaaaccagtatctgtatcaaagcggagtaaatctcccgtctggacttcgtcactaacggaaagctgtttagcaacggcattgcggatttcttttgttgccgcagtagtgctttcatctgggttggtgatttcttcaccagtcgctgtgtagtagagatgcccactatagcttgtgtatgtaggtgtgatataatatccagccgttctgagagcaacagtttgatcgttatcctcagaaagcaaatcttgtccaagttgaacatagttgctagtatcgacaccaagtaagtgaagaagtgtaggtaaggcatcaacctcaccaccataggtgtcactaataaagccgtctgtgtaccctggaatgtgaatcataaatggaacacgttggagcatagcattatcgtactctgtccaagtttctgaatctttacctagtagaggagctaggctagtatttcttgaatttgaaataccgtagtgatccccataaagcacgataatagaattgtcatataaaccagattcttttaaataattgaagaaagcctcaatggcagaatcaaggtaattagctgtagcgaagtaaccattaatggtctcatcatcagtttgagctagtgggaaaccttcttcatcagattctccggccaagctagtgtaaggatagtggttacttactgtgataaatttcgtatagaatggttgttgaaggtgttctaaatacttaatagaatcagcaaacatgtatttatcattcaagccgtattggaatgaattttcatcagtttgctcttggaaatatgatgaatcaaagaagtagtcatatccccactgtttataagtattgttacgattccagaacgaaccgacattaccatggaatacagcgctagtatatccgcctgtttgagcaagaatagaaggagcagcaaacgctgtattatctccaccgtagttaaccatatatgacccgctgctaagtccgaaaagcgatgtttccattaatgtttcggcatcggaagtcttaccagccttaacttggttaaagaagtttgagaaagaaatagttgagtttgagtgatatagcgaattaaggaatggtgttacttcataagattgtccatcaacttccagtttgtagtcaatcaagaattgttggaaactttccaaatgaataacgataacattttttccttgagcaataccataatacttagagtttggtgctgcataatgttctgaaacgtattccttaacctcggtcaaatcgtcagcagttgcttcactacgttctttttcagcttgataagtttggttagcactatagacggtgaaagatggtaaaccaagcgctctaacgacatagacatttgagaaaccacgagttagcaattcaggtctatcaatttccgccataaaaaggttgatagagaaaagcagagccgataatgctgtaatcgcaaaactagcacgtttgttgaaaggacgtttatctgtttttattttttttgtagcaaataaaataattaagataatgtaatcaaagatatagacaatatcccaaactcgcagtagatttaaggcagaatcccctaaaccagcagaaaccttactacttgcaagcattgcactaacagtaataaaatcagaaaactcacggaaataaatggcgttagcgataagtagaatatttaaaatagtgtaaataatccaactaacggcataaaaaacacgtgtcctcttaatataaaggcttaatccaagtaaaagcaaaccaagcggaatggggttgattattgaaaggaaaacttgatataaatttcccaaatcaagactaaagtcaacatggtaagcccacatggtttttagccagtacataaacaaaagcgtcaaaatgaatcccaagcgtgtgtttagcacgtgtgagataacttgtttcaattttttcactgtaggaacttcctttattttttttcctaaagataaaatctcagtttcaattatatcataaaaacttttttgttatgtgtgagaaatataaaatttagtgggaaaaattctgaatttttgatataataggcttcatgaacaaactatacgtggattctttcgttgaaaagaaaattaagcgtggtattcaacttttggatggaagagattttcatcaacttgattttgataatcagttagtcgctgtttacaatcattctcatcagtttttagggacagcttacttgtctcaacaaaataaggggattggttggttcttgggttcaagaaaaattgaattgacagaatcttattttgtggacttgtttacaaaagctaaaaaacaacgccaaaactttgaaaattcagatttgacgacggcttatcgattatttaatcaagatggagataattttggtggtgtgacgatagatcgttatgctgattttgttgtattttcttggtataatacgtttatttatcagtatcgcgatgtcattataaatgccttccaaaaagtttatccagctatcaaaggcggttatgagaaaattcgttttaaaggacttgattacgaatcagctcacatttatggtcaagaggcaccagcatcatttactattttggaaaatggtgtcaaatacagtgtttttatgaatgacgggttgatgacaggaatttttctagaccaacatgacgttcgtgatactttgattaatgaacttggtcttggaaaacgtgtccttaatatgttttcatataccgcagcgttttcagtagcggcagcaatgggtggcgctatcgaaacaacatctgttgaccttgcaaaacgctcacgtgaattatcacaagcgcattttgaagcgaatggtcttgacttgagtaatcaccattttgtggtaatggatgtttttgagtatttcaaatacgcaaaacgtaaacaattgacttttgatttgattgttattgatccgccaagttttgcacggaataaaaagcaaacattttctgtagctaaagattatcaccgcttgattagtcaagctttggaagttctgtcagaagatggcaccattattgcttcaaccaatgcagctaacctgacggtcgcacaatttaaaaagcagttagaaaaaggctttgcttctgttaaacatgactatgttcgtttgcaacaattgccaagtgatttcacggttaacaaagcagatgtcaacagtaattatttgaaagtatttacaataaaggttaaaaaatgaaaatagtagtacctataatgcctaaaaatttagaagaggcacagtcgattgatatttcgaaattcgacgaagttgatattattgagtggcgagcagatttcttagataaagatgacattatgactgttgcgccagctatttttgaaaaattttcaggtcgagaaattatttttaccattcgtacggataaggaaggtggcaacattaacttatctgacggtgactatgttgagcttttgaaaaatattaatgctatttaccacccagactatgttgattttgaatatttttctcataaagaagcttttcaacaaatgttagacttcccaaatcttgttttgtcatatcataattttgatgaaacacctgagaacttgatggagtcattttctgaactaacagcccttgctccgcgtgtggttaaggttgctgttatgccacagagtgaacaagatgtgttggatttgatgaattacacacgtggtttcaaaacattaaatccagagcaagaatacgcaacaatgtctatgggaaaacttggacgcgtttcacgttttgctgttgatgtttttggctcttcgtggtcatttgctagtttggagcaagcaagtgcgcctggacaggttgctcttgcagatatgaaacatattagggaggtacttgatgcagattgatggatacacacgcttagctgcggttgttgcaacaccgattaaacactctatttcaccatttattcataactatgcttttgataaaacgggtgttaatggtgtttatgtcgcttgggatattcctgaagaagatttggcaattacgttagaaaatgtaaaacgttacgatatgtttggtgtgaacatttcaatgccttacaaacaaaaagtgattccttacatggatgaattgactgattctgcccaattgattggggctgttaatacggttattaatcgtgaaggcaaattagttggtcacaatacagatggtattggtttctttagaagtctagcgacgtttgctgattttgatgttaaagataaaacgatgacgattcttggtggtggcggagctgccacagcactcattgcgcaagctgctctgaatggtgctagtcatattaacatttttaaccaaactcagtttttagaggcgacacgtgaaaaagcgcaagaatttgccgacaaaacgggtgtatctatcgctgtttatccagttgaagatttaaaaacgattcaagaaaaagttttagaatcacaacttttcgtcaatgctacaagcgtaggtatggacggaaaatcaatgattattacagaagattttgaattcccagcaggtttgttggttgctgatacgatttatcaaccatttgaaacaccatttttgaaattagctcgtagcaaaggtttaacagctcttaatggtttaggaatgcttttattccaagctgctgaagctttcgaaatctggactggtgaaacaatgcctacagctgaaatctggtcagcgcttgaagaaaaatacaacacgaaataagaacaactgataggtgacgcgaatgaaattgaatgttaatctcccacaaacaccttatgatattgtgattgaaaaaggtgtcttatcaaaagctggcgattgggtcaaaaaactttggaaaccacaaaaaatcgctattattactgataatcatgttggcagtttatatgctgaaaaggttaagctaagtattgaaaatgctggttttgaagtgattgtttttgactttttagaaggtgaagcttctaaaaatttaaaaacagttaacaaagcttatgaatttcttgtcaaaaatggcatgacacgcagtgacggtattgttgcgcttggtggtggtgtcgtaggagatttggcaggttttgtagcatctacctatatgcgtggcattcatttcttgcaaattccgacgagtttaacagctcaagttgattcatctattggtggtaaaacaggggttaatacgccgtttgccaaaaatatggtgggaacattcacccaaccagatggtgttttaatcgaccctgaaaccttacaaagtcttggtaaacgtgaactcattgaaggtatgggtgaagttatcaaatatggtttgattgatgatgttgaactttgggaagaattatctgctatggatggctctcctgaaagtatcttagaacacgctgagagcattatttaccgttcgtgcaatgtcaaacgtaaagttgttgttgaagatgaacttgataacggtgttcgcctttatcttaactttggtcataccattggtcatgcggttgaagcgactgctggttatggaaaagtcatgcatggtgaagctgttgccattggaatggtacaaatttcgcgtgttgctgagaaaaaaggcttgatgcctcaaggtattacaaaagaaatttttgacatgtgccaaaaatttggcttgcctacggattacaaaccatggcatgttgacgaactttatggtgctttagtacatgataagaaagctcgcggtaaaatgattaagacagttattgtaccagagcttggtagcgcagcgatcaatcagatcccacttgaagagatgaaagagtatttggagaagtaaaatgagatatttgacagctggtgaatcccacggaccgcgtttgacagcagttatcgaaggagttcctgcagggcttcctttaactgctgaggatattaatgttgatttaaaacgacgccaaggtggttatggacgtggtgggcgtatgaaaatcgaatcagataaggtagaaatcacatctggtgtacgtcacggaaaaacaactggtgctccaattacccttcatgtcatcaataaagaccatgaaaaatggcttgatattatggcagttgaggatattgatgatagcttaaaaacaaaacgtaaaattactcatccgcgtccagggcatgctgaccttgttggtgggatgaaataccgttttgaagatttgcgtaattctcttgaacgctcatctgcacgtgaaacaacaatgcgtgtagccgttggagcggtggcaaaacgtattttagcagagcttgatatcgaaattgctaatcacgttgttgtttttggtggcaaagagattgatgttccagagggactgactgtttcacaaattaaagaattggctagtcaatcagaagtttcaattgtcaatcaagagcgtgaacaagaaatcaaagattatattgaccaaatcaaaaaagatggtgatactattggcggtgttgttgaaactgttgtcggtggcgttccagttggtcttggttcttatgttcagtgggacaagaaacttgatgcaaaaattgcaggtgcggtcgtttcaatcaatgctttcaagggagttgaatttggtttaggatttaaagatggttacctcaaaggaagccaagtcatggatgaaattctttggaacgaagaagatggctacactcgtcgtaccaataatcttggtggttttgaaggtggtatgactaatggacaaccaattgttgttcgaggagtcatgaaacctattccaacactttataaacctttgatgtcagttgatattgaaacacatgagccatacaaagcaacggttgaacgttcagacccaacagctcttccagcagcaggtgttgttatggaagcagttgttgcaactgttgtggcagatgaaattcttgaaaaattctcttctgataatcttgaggaattaaaagaagctgtcgctcgtcatcgtgattatgtcaaacatttttaaaaacataacattttgacaattggagggcgtgtgctctccaatattgctataaagatttgcaaaccagaaatggagtaactatggaaaataaagtgatttatattgcaggtttaggtttgattggtggttcccttgctttgggaatcagacgtgaccaccctgattataaaatccttggttataatcgctctgataaatcacgcaacgttgcccttgaacgcggaattgtggatgaagcgactgctgattttaaggaatttgcgcccttagccgatgtcattatattagctgtgccaattaagcaaacgatcgaatttattaaggctttagctgatatggatttgaaagacaatgtcattattacagatgcaggttctacaaaacgtgaaattgtcgaagctggtgaaaaataccttgctggaaaaaacgttcgttttgttggctctcatcctatggcaggttctcataaatctggtgctattgctgctgaagtcaatttatttgaaaatgcttattatattttcacgccgtcaaggctgacagatgccagcacaattgctgacatgaaagttattttgtcagggcttcatgcgcgctacattgaaattgatgctgctgagcacgaccgtgttacaagtcaaatttcgcattttccacatattttggcagctagtttaatggaacaagctggggattatgcttcggaacatgagatgactaaccactttgcggctggaggttttcgtgatatgacacgtattgcggaaagcgaaccaggtatgtggactagtattttactaaccaataaggctgcggttttagagcgtattgatgattttaaaaacagacttgatggcgttgcggagcttatttcgcaaaatgacgccgatgctatttggaattattttaaccatgccaaagaaacccgcaaggaaatgaacattcacaaacgtggtggtgtcgaaagcggctttgatatttttgttgacgttcctgatgaagaagatgttatcttggaaatcttggaattacttcgtggaacatctttggttaacgttcatattaacgaagaaaaccgtgaggatattaatggtattttgcaaatttcctttaaaaatatcaaagatttggaacacgctaagaaagttatcagtgaaaatactgattataaagtttatgttaattaaggagacttactatggcaaatatttatgatttagcaaatgaattagaacgtggcatccgtgcccttccagagtataaaaaagctgaagaaagtcgtgcagcgattgaagcagatgcggcagctaaagaacttttcaaagaatttacagattttcaacaagggcttgatgctaaattgcaatctggacaaatgcctactggtgacgaacaagctaaaatgcaagaattaggagctaaaattgaagctaatccagttctgaaagcttacctcgatgcgcaacaagctttgtcagtttatgtatctgacattgaaaaaattgtctttggacctttgcaagaccttttgaaataatgatattttacaacctgacattctttgttaggttgttttcgtattttctgaatcaaaggtctataatgagtgataactttataagggggaatgttgtatgtcacgtaaggtcggaattattggaatggggcatgttgggtcaacagttgctcatggtttgattgctcaaggtgcatttgatgattatgttttgatagatattaacgaaaagaaagttacagcggatgctgttgattttacagatgcggcagctaatctcaatcagcatgctaatatcgttgtcaatgattatcaagcgttggcagatgcagatgttgtgatttcagctttggggaatattgctttgcaggacaatccagatgcggaccgttttgcagaattgccttttacagcaaagcaagtaccacttgttgctaaaaaattaaaagaagttggttttaaaggtattattattgcgatttctaatcctgttgatgttgtgactagcctttatcaacattattcagggcttcctaaggaacgcgtcattggtacgggaacgttgcttgatacagcacgtatgaaacgtgcagtttcagaacgtttcggtgtagatgctcgtagtgtttatggctataatttaggtgagcatgggaattctcaatttacagcatggagccaagtgcgtgtgaaggggcaatcgatttcaacatttacagatgctaagactttggacgaaattgctcatgaagcgatgattggtgggcatactgttttctacggtaaaaaatacactagctatggcattgcaagtgcggcaatccgtttagctttagctgttgtgtcagatagccacgaagaattaccagtgtcaaattattatgaaccgcttgatacttaccttagctatcctgccattgttggacgtgaaggaattatcgagcaaataaaattgacattaccagcagaagaagaagcaaaacttgaaaattctgccaactttattaaacgtaaatttgcagaaagtctaaattaaagaaaaaagaaatcccatctggaaaatcaggtgggattagtgatttagcaagtgatttcgaactttagaaatgaaataaagtgaccctgtcaccacaaataagtcttctggattgtcatctacccttgagagccagtctttgtaatcagcaacttttgggtattgttctgggtagtctgacaatgcctgcgcttggtagaaatcaaatgttgtgacggttaagtcataggcggacaattcttccagcatttgtgttaaaggcttgcgatttagccctgcaaataaaatgtgaattttctgttgagcaaagtcattctttagtaagtcaactaatttggcgatagaatcttcgttatgagcaccatctagcattagattgggcttgatgagttcacaacgccctgcccaaacagtctcttctagaccagatttgattgtaattggtgtaatagctggcaattgtttttgaagaatcaatgcagtcatagctgccaaagaagcgttagttttttggtgtttaccaagcattttgagctgaatatctggaataatggtttgatgataaatcatatcaaaagctctgccattttctataaacgagaaatctttccctaactcataaatgctggacattgtctcttcggctttctgataaaaaacgcggcgaacgggctctgccatttttccaaaaataaagggaacgtttgtttttaaggcacctgctttgtgctgggcaatctcagctagggaattgccgagtgtttcttggtggtcgatgctgattgaggggcaaatgacggctttggctgtgaaaacattggttgaatcgtaagtaccaccaatcccagcttcgatgaccgcaatatcgacaggattaacaactgcaaaataataaaacatgagagcagtgactaattcaaattcggtcaccttgccgaccttgtcttgaaattctgcgctattgacaatcggcttaatagcttgaactgttttgaccaaatcttggtcaggtatttcaacgctatcaatagcaatgcgctcattaaaacgagtgataaatggcgatgtgaaagtaccagtcttgtaaccagaagcagttaaaatatgttgtaaaaagcttgttgttgaacctttgccattggttccgacgacgtgaatcgcaggaaatttatcttgcggattgtcgagtaatgcgagtaaatactgcatacgctcaaggctcggacgacgtccgttggctttatgagaatgaatccagtttaatgtttcaatataattcataacttttctttttgattaaattcgtaaaaaagaggtgagaacttagtgtacttacctcttttgagtgtgattgagacaatctaaaaatcaatatgagcagcaaatgctcgttgaaaacgatattgccactagtaacgattactcagttgtttcggtgttgctacttgtagtggtatcgtcagaagttgtatctgaacttgacggtgttgttgaactttggcttgtagcagagcttgaactataagtggtatctgaacttgaactgtaagtattgttattagaaccactgttgtagttattattagcagaagcagaacttgaataagttgtcgaagcggaagtgtctgttttactatcgctgtcgctttctttgatgacaacagttgttgtcgttgttgatttgtctgttgtctttgagtttgacccctttaaggcattgctaatggtaatacttgccacaatgatactaagaatagaaccaataagagcaactgttttttgaagggcagaaaagcctgtcttaatgtgttttgttggggcagctgacttatcgttttttgatgatgatttttgacgtcttgagtatttttgagacatgattaactcctttttcgcatatgactctattataaaatattctttttaaatgtccagcgttagaatttttttgcttcaaaaattattgtacgccaaattcttaaagttaaccttaaaaaaacttaaaattaaaactttcacactcataaaagtctgtgctataatggtagtattgatttttgtgaaggaagaaaaaatgatatattttgataattcagctacaacaattccctatcctgaagtgttgcgcacttatcaggaagttgctagcaagatatttggaaatccctcaagtttgcataatttaggaacaaaggctagtcgtattttagaagctagtcgcaagcaaatcgcggatttattaggggttaagagcaccgaaattatttttacgtctggtggtacagaaagtgacaactgggtacttaaaggtgttgcctttgaaaaagaacgttatggcaaacacatcatcgtttcagatattgaacacccagcggttaaagagtcggcaaaatggctaagcgaacacggttttgacgtttcatatgcacctgttaatgaccaaggttttgttgatgtcaaagcattagctgcgcttttgcgaccagatacaactttggtatcaatcatggcagtgaataatgagattggctctatccaaccaattaaagaaatctctgaattattagctgataagccaggaatttcattccatgtggatgctgttcaagctatcggaaaaattccagcagcggattatttaactgaccgtgttgattttgcaagcttttcagggcataaattccacagcgttcgtggggttggttttatttataaaaaagaaggtaaaaaattaaacccattactagctggtggtggtcaagaaggcgaccttcgttctacaactgaaaatgtggcaggaattgcggctacggctaaagcacttcgcttggtgactgacaaagaagcttatgctcttccgaaaattgccaagatgaaagaagttatctatgacgagctagctaagcacaaagatattgtcattttctcaggtaaagatgacacatttgccccaaatatcttaacctttggaattaaaggggttcgtggtgaggttgtggttcatgcttttgaagaacatgaaatctacatttcaaccacatcagcttgttcatcaaaagctggaaaacctgctggaacattgattgctatgggtgttccaacgaaattagcacaatcagctgtccgaatcagtcttgatgacgataatgacatgggacaagttgagcaatttctaacgattttcaaacaagtttacgaaaaaaccaaaaaagtaagataataagaaaggataaagagagttttctctttaataaactatgcagtattcagaaattatggttcgttacggcgaactatcaaccaaaggaaagaaccgtatgcgtttcatcaataaattgaaacgtaacatgaaacacgttctttcaatttatccagatgtgcgtgttgttgctgaccgtgaccgtgctcacatttatttaaatggcacagattacgtaccagttgctgaatcattgaaacaaatttttgggattcaaggcttctcgccatcatacaaagttgagaaaaatcttgaaaccattaagaaagcagttcaagatgtgatgaaagatgtttatcacgaaggactaacttttaaaattacaagtaaacgtagcgaccataactttgaaatggatagtcgcgaattgaaccaataccttggttctgccgtgtttgaggttttaccagatatccaagctcaaatgaaaggtccagatgttaatttaaaagttgaaatccgtgaagaagcagcttacctttcctatgaaaatatcaaaggtgctggtggtctccctgtcggaacagcaggacgaggaatgttgatgctttctggcggaattgattcaccagttgcaggttaccttgctcttaaacgtggggttgatattgaggcagttcactttgctagcccaccttacacaagcccaggtgctcttaaaaaagcccaagatttgacacgtaaattgactaaatttggtggtaatattgattttatcgaagtgccatttacagaaattcaagaagaaattaaagaaaaagcacctgaagcttacttgatgactttgacacgtcgttttatgatgcgtattactgaccgtatccgtgaagaacgtaatggtttggtgattattaatggtgaaagtcttggacaagttgccagtcaaacacttgaaagcatgcgtgctattaatgcggtaaccgcaaccccaattattcgtccagttgtcacaatggataaattagaaatcattgatattgctcaaaaaatcgatactttcgacatttcaattcaaccatttgaggactgctgtaccatttttgcacctgaccgtccaaaaacaaatcccaaaatcaaaaatgttgaacaatacgaaaagcgtatggacgttgaagggcttgttgaacgtgcggttgcaggtattaaagtaacaacaatcactccacaagcagaccacgatgaggttgatgacttgattgatgatttattataggagacaaaaagctaccgttggtggctttttagtttgcctttttaggtaaattctggctcctttgctagaaaatgctataatagtgtctggaggtaagattaagtgatgtttgataggattatttataaaaaaacaacgcttgcttgtttgagttttttggtgatttccttgcttggttcgggtgtgtatagtctagcttttgaaaaatcgatcgctaatacgacacaaacgacagaaaaacaagcacaaaataaaagcaatacgacgaaaacagcgcgtgtcatggcaaatggtgatattcttattcacaacgggctttatggaagtgctgaacaagctgacggaagctatgatttcacgccattttttgaatatgtcaagagctggatttcaagtgctgacttggctatcggtgattacgaaggaacgattagccctgattaccctttgggtggttatccgctttttaatgcaccaagtgaaatcgctgacgctatgaaagacacggggtatgatgttgttgatttagcgcataatcacattttggattctgggcttttaggtgctatcaatacggttgaaacctttgaaaatcttggcttgtcaactatcggtgtttacaaagaaaatcgtgatacggaagacattctcattaaaaatgtcaacggcatcaaaattgcgattttgggttattcttatggctataatggcatggaagcaaatgtggcagatgaagattatgaaaaacatatgtcagatttagatgaagataaaatgaaatcagaaattcaagaagctgaaaagaaagctgatgtcacaattgtcatgccacaaatgggaacagaatacgctcttgaaccaacagacgaacaagtaacgctttatcataaaatgattgactggggagcagatgttgtgtttggtggacaccctcacgttgctgagccgtctgaaacgcttgaaaaagacggtgataagaaatttatcatctattcaatgggaaattttatctctaaccagcgtttagaaacggttgataatatctggacagaacgtggtctcttaatggacgtcacttttgaaaagaaaaataataaaacaacaatcaagaccgttgccgctcatccgacaatggtttgggtttggagcaagggtgtgacgggctcagaaggctttgtgctttccgattatcgaacgcttgttttggaagattttattgaaggtggaaagtatcgtgatattcttgattcaactatgcaagaaaaagtggatactgcctaccaagaaatgaatgaattggtgaatttacaatgggattaagtcgtcaaaaagttaacctattttcaaagagttatgaagatgttaaaaaattatacctaactgcctttccagcagtagaacggttaccctattttccattagttttgaatgcttatcggcgtttagcgaatttttatgcctactatgataaggatgactttgttggtttagtgtatttgttggagaatgaagaagttatctatcttttctttcttgcggttaatccaaatattcgttcacgtggctatggctctgccattttacaagacattagaaatttagcaggaaaacgtccgattattcttgccatggaaccattagataaaactgctgaaaattatcatcaacgtgttaaacgagttgctttttatgaaagaaatggatttaacatcacggattattattatcatgaaggaacagaagtgtatcaagtcatggcaacagatgcctcgcttaacattcaagtagtggaaaaattaacgaaaaaagcggtgctaggcttaattgctatttcatttgagaaaaaaagcagaatgaaaacgtaatattgctaaaaaaacatagcatattccttgatttaatcactttatcatgttaaaatatgaacgttgactaaatgcacatcctgtgcaaccgcacgaaaatcgttcataagtaactttcgaagttcacgatttaggcgagtcttcacaagcggaaaatccgcaaaaaaatttataggaggtgcacgatgagcacatatgcaatcatcaaaactggtggaaaacaagttaaagttgaagtaggtcaagctatctatgttgaaaaacttgatgttgaagctggttcagaagtaacatttaacgaagttgttcttgttggtggtgacaaaactgttgttggtacaccagttgttgaaggagctactgttgttggtactgttgaaaaacaaggtaaacaaaagaaagttgttactttcaaatacaaacctaaaaaaggtagccaccgtaaacaaggtcaccgtcaaccttacacaaaagttgttatcaacgctatcaacgcttaatttggcattattatgattcaagcaacttttattcgccacaaggataacttagaaagtgttgaactgactggtcacgctggtagtggtgagtatggctttgatatcgtatgtgcagctgtctcaactttatcaattaacttggttaattcgttagaagctttggcagattgcaacgctgatttagctatcaatgagattgatggtggttatatgaagattgatatctctcatgtaactaaaaagacagatgagaaagttcaacttttatttgaaagctttcttttaggaatgacaaatttggcagaaaactctcaagggtttgtgtcagttcaagtcattgcaaactaatttgaaaagaggacacaacatatgttaaaaatgaatcttgctaacttgcaacttttcgcccacaaaaaaggtggaggttctacatcaaatggtcgtgattcacaagctaaacgtctaggtgctaaagcagctgacggacaaactgtttcaggtggatcaatcctttaccgtcaacgcggtactcacatttacccaggtgtaaacgtaggtcgcggtggtgacgatacactcttcgctaaagttgaaggtgttgtacgtttcgaacgtaaaggtcgcgataaaaaacaagtttctgtttaccctatcgcaaaataatagcgtaaatagatattattgaaagctttgtcaatcttggcagggcttttttaattgcctgaccaccttggaagagagccttgcgttgtcaaattttgaaactagcctaaaaggctattacaagtttgttaaccattttgcaaaaagaattaggaaaacaggcaacagcctagtttttttgttataataaagttgattgatttttagaaagaatgatttaaatgaacatacaacaattgcgttatgtcgtggcgattgccaatagtggtacatttcgtgaggcggcttctaaactttttgtaagccaacccagcttatcagtagcaattagagatttagaaggcgaacttggctttcaaatctttactcgaacaacaactggagcggttttgacaagccatgggatgactttttatgagaaagctcttgaggttgtgaaaagttttgattcctttgaaaaacaattttcacaagcagcagcggattcagatgaattttcaattgccagtcagcactatgattttttgccaccgttaattaccgctttttcacaagctcacccagaacataaagattttcgtatttttgaatcaacgacgattcaaattttagatgaaattgctcaaggcgatagtgagatagggattatctatttaaataatcaaaatcgtaaagggcttttgcagcgtatggaaaagcttggtttggaatttgttgagttaattccatttcaaacccatatttatcttgctaaagagcatcctttagcgaaaaaagatagcttggttatggctgatttgttgggatttccgactgtacgatttacccaagaaaaagatgagtacctttactattctgaaaattttgtggatacaacggatagttctcgtatcttcaatgttactgaccgtgctactttgaatggtattttggaaagaacggatgcctatgcaacaggctctggtttcttagatagtcgtagcgtaaacggaattactgtcattccacttgaagatgatttggataataaaatggtttacatcaaacgccgtgataagaatttatcagcttgtgcgcttaaatttatcgctgttatgaaggattattttgctaaattcagcccaaaggtgactaaatgaagacattaagaaaagtttattttccgcttgctgctgtggttttgattgttttagaccagttaagtaagctatggattgttaatcacatcactttggacaccattcaagagtgtttgccaggtatttttagtttaacttacttgcgtaattatggcgctgctttttcgattttacaaaatcaacaatggctatttgcggttattacgtttgcggtcgttggggctgcttgctattattttattaaaaatatcaatggtcagttttggtttttacttggtttaatcctcattatctcaggcggtttaggaaattttattgaccgtgtgcgccttggttatgttgttgatatgattcatttagattttatgaattttgcggtgtttaacatggcggattcttatttaacagttggggttgtgatactattcattgccctttggaaagaggaggagaatggagttaatcattaaggaagctggtgttcgtttagacaaggcgctagcagatttgacagagttgtcacgtagccaagctaacgatgaaatcaaaaaaggaacagttttggtcaatggcaaagctgttaaagcgaaatatgctgtcaaagttggtgatgttgtcacttacgaagtgccaaaagaagaagtgctagaatatacagctgaaaatattccacttgatattatttacgaagatgatgacgttgctgtggtcaataaaccacaaggaatggtggttcatccgtcagttggtcatacgtctggaacattagtgaatgccttgatgtaccacattaaagatttatcttcgattaacggtgtgattcgaccaggaattgtgcatcgtattgataaagacacttcaggtttgttgatgattgctaaaaatgataaagctcacaacgcacttgcagcagaattgaaagataaaaaatcacttcgtaaatacgttgcaattgttcatggcaatattccaaatgaccgtggtgtcattgaagcaccaattggacgttcagaaaaagaccgtaaaaaacaagctgtgacagcaaaaggcaaacccgctgtaactcactttaaggttttggaacgttttggaaattatatgttggttgagttgactttggaaacagggcgtacacaccaaatacgtgtgcatatggcgtacattggtcatcctgttgctggtgatccgctttatggaccacgtaagacattaaaaggcaatggtcagtttttacatgcacaaacacttggttttactcatccaacaacgggagaaacattgactttcacggcagaagcgccagctatttttaaagagacattggaaaatctaagaaatggcaaagcttaatgataaagcagagtttggataaccaaattctgcttttttgctataaagttggtaaaagataatcgtaaatctcttgtcaaataatcatagttttggtatcatatagagagtaaatattatcctttaatactgtcccgtgaggcaggcaaggagagaacggtaaaagaagtgtgcaactggcatagttgtacctatattttgtggaatctccttggtaacgaggagattttttgtatattagagaggtttgttttatgaaaacaaaagaaattgttgatgacgtaacaatgaaacgtgcgattacacgtatcacttatgagattatcgagcgtaataaaaatcttgataatattgttctcgcaggaattaagacgcgcggtgtttttatcgctcgccgcattcaagatcgcttgaaacaattggaaggaattgatattccaattggcgaactcgataccaaacctttccgtgatgatatgaaagtcgaagaagatacaactgatatgccagttgatattactggaaaagacgtgattttggttgatgatgttctttatacaggacgtacaatccgtgcagcaattgataacttggtaagtcttggacgtccagcgcgtgtcagtcttgctgtacttgttgaccgtggtcaccgtgaactcccaattcgtgctgattatgttggtaaaaacattccaacaagtgctgtggaagaaattattgttgaagtgattgaagtagatggaaaagatcgcgtcagcattgttgatccaagctaagcagttatagaattgaggaggaagataaaaagtggaaaacgtaaaatatgatgtgcatgatatgcctaaaccagggatgttgtttggactatcattccaacatttatttgccatgtttggctcaacggttttggttccaattctagttggtattgacccagcaatcgcccttttctcaagtggtttgggaacattggcacatttgacagtaaccaaatataaaatcccagcttacatggggtcaagttttgcttacattgcaaccatgcaaatgctaatgaaaaccgatggtattgcggcagtagcacaaggggcaatcgcaggtggtctagtttacttaatcgttgccttgattgtcaaatttgctggaaatgcttggattgataaagttcttccgccaatcgtggttggtccaatcattattgttatcggacttagtcttgcaacaacagctgttgatgatgtcatgttgaaaaatggtgaatataatttcacataccttttgattggtatggtaacgctccttgctgttattctatttaatatgtatggcaagaaaattattggtgttatcccaatccttcttggtttgattgttggttatattttcgctttgattgttggcgcagtaacaggtcaaacaattgttgacttatcagatgttgctaaatcagcttggttccaagttccaagttttgatattcttttcgtggattatcacttcaaactttatccaagcgcgattttgacaatggcaccaattgcttttgttactatgactgaacattttggtcacgttatggtgcttaatagtttaacaggacgtgacttctttaaagacccagggcttgaccgtacccttacaggtgacggtattgcacaaattatcgctggtttctttggtgctccaccagtaacatcttacggtgaaaacattggtgttatggcacttaataagatttactcagtttatgttattgctggggcagctgtgattgcagtagtgatgagctttatcggaaaaatttcagcattgctttcttcaatccctacaccagttatcggtgggatttcaattgccctctttggtgttatcgcctcaagtggtcttaaaatcttagttgaaaataaaattgattttgataataagaaaaatcttttgattgcaagtgttatcttggtatctggtattggtggcttaacattgcaagttgctggtttacaaattacaggtgtcgcattctcaacacttttaggtatcattttgtatcaaattcttccagaaaaggattaagaaaatggcagttacagatggcgttgtttcactaaaacatttagtgactatggaaacattatcaaacgaagaagtgcttggcttgattagacgtggtatggcgtttaaaacaaataaagcagactttagtttagataggcagtattttgcggcaaatcttttctttgaaccgtcaacgcgtacgcataagtcttttgaagttgctgaaaggaaacttggattggatgtcattgaatttgacgctaaaacaagttcagtgaacaaaggtgagactttgtatgatactattttgacgatgagttctttgggaattgacatttgtgtgattcgccattcaatggaagattactacaaagaattaattgatagtcgaacaattcaaacagcaattgtgaatggtggtgacggttcaggtcaacatccaagccaatgtctgttggatttaatgacgatttatgaagagtttggtggctttgaaaatctaaaagtagctatcgttggtgatattacccattcacgtgtggcaaaatcaaacatgcaaattctaaaacgtctcggagcagaattatattttgctggtccagaacaatggtattcaagtgaatttgatgtttatggaaaatacgttgcaatcgatgatattgttgataaggtggatgtcatgatgatgcttcgtgtccaacatgagcgccatgatagcgaacgtggtttttcaaaagaaacctatcataagatatatggtttaaccgctgaacgttatgaaaaaatgaaaacttctgcgattatcatgcaccctgcaccagtcaatcgtgatgtggaaattgcagatcaattggtagaagcgcctaaatcacgaattgcaacacaaatgcaaaatggtgtttttgtacgaatggcaattctagaagctgtgctgaacggcaaagcttaatgaataacttactttagtttgaagtgtctgctaataaacgttaaagtgctcccgtgagagcaaacgagaggaataaaaatggcaaaaagacttttaattttagaagatggaacaatttttgaaggaaaagcttttggagctgaccttgatgtaacaggtgagattgtttttaacactggtatgacgggttatcaagaatctatcacagaccaatcttataatggtcaaatcttgacttttacttacccgttggttggtaattacggtattaatcgagatgactatgaatcaatcacaccaacttgtaaaggtgtcgtcgtttctgaaaatgcacgtcacgcaaacaattggcgtaatcaaatgactttagacgagtttttgaaagctaaaaatattccaggaatttcaggaattgatacacgtgctttgacaaaaattatccgtaaacacgggacaatgaaagctacacttgctagtggcggtgattctatcgaacatttgcaagtgcaattacaagcaacagttttaccaacaaataacatcgaacaagtttcaacaaaaacggcttacccagcaccaggtgttggtaaaaatatcgtcttggttgattttggattgaaacattctatcctacgtgaattttcaaaacgtgattgcaatgtgactgttgtcccttacaatattacggctgaagaaattcttcacttgaatcctgacggcgtcatgttatcaaatggtccaggtaacccagaagatgttccagaagctcttgacatgattcgtggtgttcaaggcaaaattccaatcttcggtatctgtatgggacatcaattattcagcttggctaatggtgcgacaacttacaaaatgaaatttggtcaccgtggatttaaccacgctgttcgtgaaattgcaacgggacgtattgattttacaagtcagaaccatggttatgccgttgaccgtgacactcttcctgattgtctgatggtgacgcatgaagaaatcaatgataaatctgttgaaggtgttcgtcaccgtgacttcccagccttttcagtgcaattccacccagatgctgcgccaggtccacatgatgcaagttatctttttgatgacttccttgaattgattgacgcttttcaagctgaaaaagctcgtaactaatatttaaatctaatccgtgagttagataatatagaaaggagaagatacatcgttcagattggctaatgagctaatttgaacaagccatacaagctgcgccaaaagataatctttagaaatagatgttatcgtggtttttattacttgtttggctttgtatcatagattatgccaaaacgtacagatattaaaaaaattatggtgattggttctggtccgattattattggtcaggcagctgaatttgactatgcaggaacacaagcttgtcttgcccttaaagaagaagggtacagcgttgttcttgttaactcaaacccagcgacaatcatgacagataaagaaatcgcagatcaggtttatatcgaaccgttgacactcgagtttgtcacacgtattatccgcaaagaacgtccagatgcgcttcttccaacattgggaggacaaactggtcttaatatggcaatggagttgtcaagagctggaatccttgatgaacttggtgttgagttactaggtacaaagctatcagcgattgatcaggctgaggaccgtgaccttttcaaacaattaatggaagatctcaatcaaccaattccagaatctgaaatcgtcaataccgttgatgaagcagttgcctttgcagaatcaattggttatccagttatcgtacgtcctgcctttaccctcggaggtacaggtggcggtatgtgtgataacgaagaagaacttcgtgaaatcgctgaaaatggtttgaaattatcaccagtaacgcaatgtttgattgaacgttctattgcaggattcaaagaaatcgaatacgaagttatgcgtgatgctgccgacaacgcccttgtggtttgtaatatggaaaacttcgatccagttggtatccacactggggactcaatcgtatttgcaccaacacaaactctttcagacatcgaaaaccaaatgttgcgtgatgcaagtttgagcattattcgtgcccttaaaatcgaaggaggatgtaacgttcagcttgctcttgacccaaatagcttcaaatattatgttatcgaagttaacccacgtgtgtcacgttcatcagcccttgcctcaaaagcaacgggttacccaatcgcgaaattggctgccaaaattgccgttggtttgacccttgatgaaatggttaacccagttactggaacaacatatgctatgtttgaaccagctcttgactatgtggttgccaaaattccacgtttcccatttgataagtttgaaaatggtgaacgtcgtctgggaacacaaatgaaagcgactggtgaggttatggctatcggtcgtaatatcgaagaatcgcttttgaaagcttgtcgttcacttgaaatcggtgtttaccacaatgaaatggctgacttggtagaagtttcagatgacgaattggttaataagattgttcgtgcgcaagatgaccgtctgttctacctttctgaagccatccgccgtggatacactatcgaagaactatctaaactaacaaaaatcgaccttttcttccttgataaattgctccacatctttgaactggaacaagagttagaaagtcatgtcggagatgttgctgttctgaaagaagctaaacgcaatggttttgctgaccgtaaaattgcagagctttggaacatgactgccgctgacgtgcgtactattcgtactgaaaataaaatcattccagtttataaaatggttgacacgtgtgcagctgagtttgaatcagcaacaccatatttctattcaacatatgaatgggaaaatgaatcagtcaaatctgacaaagaatctatcatcgttcttggttcaggtccaatccgtattgggcaaggggttgaatttgactatgccactgttcactcagttaaagctattcaagcagctggatatgaagccattatcatgaactcaaatccagaaacggtatcaacagacttctcaatctctgataagctttacttcgagccattaacgttcgaagatgttatgaatgttatcgaactcgaacaaccaaaaggtgttatcgtgcaattcggtggtcaaacagctatcaatttggcagaaccattgtcaaaagctggtgttactatccttggtacacaagttgctgaccttgaccgtgctgaagaccgtgacctctttgagcaagctttgaaagaattggatattccgcaaccaccaggacaaactgcaacaaatgaagaagaggcggttgaagctgcgcgtaagattggcttcccagttcttgttcgtccatcatacgtacttggcggacgtgctatggaaatcgtagaaaatgaagaagatcttcgttcttacatgcgtacagctgttaaagctagtccagaccacccagtccttgttgactcatatatcgttggtcgtgaatgtgaagtagatgcgatttctgacggtaaagatgtgcttattccaggaatcatggaacacatcgaacgtgcaggggttcactcaggtgactcaatggcagtttacccacctcaaacattatctaagaaaatccaagatacaattgctgattacacaaaacgtttggcgattggattgaactgttttggtatgatgaacattcaatttgttatcaaagatgaaacagtttacgttatcgaagttaaccctcgtgctagtcgtacggtgccattcttgtctaaagtgactaacattcctatggcacaagttgcaacgaaattgattcttggacaaactcttgctgaccttggatatgaagatggcctttacccagaatctgattatgtgcatgtgaaagcaccagtcttctcattcacaaaattagctaaggttgatagtctccttggtcccgagatgaaatcaacaggtgaagttatggggtcagaccaaacacttgaaaaagctctttacaaagcctttgaagcttcatacttccatttgccatcatttggtaatgttgttttcacagtttccgatgatacaaaagaagaagcgcttggtttggcgaaacgttttgctaatatcggatacagtatttttgctacacaaggcacagccaaatattttgctgagaatggtttggtgtcaacgattgtcaataaacttggcgaagatgatgagaacgatattccagcccttgttcgcactggaaaagttcaagctatcgtcaataccgttggtacaaaacgtacgcttgacgaagatggtgcaacaattcgtagctctgctattgaacacggtattcctctctttaccgcactcgatacagcagatgctatgattcgtgtccttgaaagtcgtggattcacaacacaagctatctaaatatattcaaattatagaaataagaagctgagccaacgctcagtttcttttgtttagccataaattttcactatcaaagagcctcaaaatttctacttacaaaactgtaaggttattgagagctgtttttcttataataaatatgaaagatggtttttacattttattcttgacagtaaaatgccaaaaacgtataattgtcttatcgcaacaatacaactatacaaaagaaaaagaggaagattatgcctagaagaagtaaagcgaaaatgtctaaaaagactaaagggattattggagctgcggcagcttgttttgtcgttgcaggtgcagctctgctttggtggcaacaaaccaaaacatcagagtcaaccgttgaaacaacctacgataccacagctgtaacagagggtaccatttcatcatcaactttgttgactggtacagttaaagctttccaagaacaatacgtttattatgacagcagtaaaggaactgaagctagaccaacggtgtcagtaggtgaccaaattactactggtcaacaattggttcaatacgacactacaacagcccaagcagcttatgacacagctgttcgtaatttaaataaggttggacgtcagattaattaccttaaaacatatggtaatctaccgacaacatcgacaacgactgatgaagaaactggcgaagaaacaactgttacaacaccaccaacagctcaagagaatgcacaatacaatcaacaattgcaagatttaaatgattcttatgcagatgcacaagctgaggttaataaagcacaacaagctctaaacgaaaccgttattgtgagtgatgtgtctggtacagttgttgaagtcaataatgacattgacccatcatctaaaaatagccaaacgcttgtccatgttgcgacagaaggtcaattacaaatcaaaggaacattgactgagtatgatttggctaatatcaaaacagggcaaaatgtcaaaatcaaatctaaagtttatccagaccaagaatggactggtaccatttcatacgtttctaactacccaaatcaatctgatgattcaactggaacaggcggttcaagttcatcttcagggtcagcttcttatgattacaaagtcgatttgactggtgatatttctaatcttcaacaaggattcacagtatctgtagaagttgttaatgaaaataaaaacaaacttgtgccagttgatgcagttgtcaatgaaggtgataaaaattatgtttgggtttacgataaggacagtcaaaaagcaagtaaagttgaggtaacacttggaagcgctgatgccaaacaacaagaaatcttgagtggtttagaagttggtcaaatcgttatttctaacccagatagcagtttgaaagatggtgaaaaagtttccaatgttacttctgatgatacagccactacagaagaatcagaggtgagcgagtagtgacagaagaaagaaaagttttaattcaactcaaagatattgtcaagtcctaccgtaatggtgatcaggagttgcaagttcttaaagggattgatttgacagtttatgaaggagagttcctagcgataatgggaccttctggttcagggaagtcaacccttatgaatattattggtttacttgatagaccaacttctggcgattacagtttaaatggaacacaagttgaagacttgaaagaaaaagaattggctaaagtgagaaatgaagaaatcggctttgtttttcaacagttcttcctactttcaaaattaaatgctttgcaaaatgttgagcttccacttatttatgctggggtcggtgtttcaaaacgccatcaacttgctaaacaatttttagacaaagttgaactaggtgaacgtatgaagcacctgccttctgaattatctggtggacaaaaacaacgtgttgccattgcgcgtgctttggtcaataatccttcgattattttggcggatgaaccaacaggcgcccttgatacgaaaaccagtgagcagattatgcagctattgacagaacttaatcgtgaaggtaaaaccattgtcatggttacgcacgagccggaaattgcagattttgcaacacgtaaaattgtcattcgtgatggtgaaatcacaagagacacgacagatagtgttaggattgactaaggaggaagattatggaaaactggaaattcgcccttagttcaatcatggggcacaagatgcgctcattcttaacaatgttagggattattatcggagttgcttcggttgttgttatcatggcgttggggcaaggaatgacaaaacaaatcacagatatgttttctgccgatacacgtgacattgagatttattatgttgctaaggattctgacagcaaaagtatttttgacgatgatgttgaaacgacatcatcagacaaaggtcctaaaattcgggaagaatggttgcaaaaaattacttctgatgtttcaggggttcaaaactattacttgacgaatggtacgactgcaacggtttcgcttaataagaaaaaagccaaaaacgttaacattataggtgttaataagacctattttgatgttaaaaaatacaaggttgtagctggaagaaatttccgttcagatgattatgagcatttttcacgtatcattatgcttgatacgaaattggctgtgaaactatttggaacgaatgataatgccttaaataagcaggtttcagtcggttctaaatcatacttagttgttggtgtttataaagatccaaatgctggttcagctctctacggaatgagttcaggtggtaatgctgtcatgacaaacacacaactggctgctgagtttaatgttaacgaaattgaggcggcatatgtccatgttaatgatgcaacgcaagcaacaaccgtaggggaagaagctgctaaagtgatgacacaagtatcaggtgtgaaaacaggccactttaccatttttgatatgtctaaacagattgctgaaattaattcagcttatggcatgatgactacagttattggtgcgattgctggtatctcactgttggttggaggtattggggttatgaacatcatgcttgtatctgttacagaacgtacacgtgaaattggtttacgtaaggccttgggggcaacacgcaggaaaattttgacgcaatttttaattgaatcaatggtattgactctccttggtgggctgatcggtttaggtttggcagctggtttgacaagtattcttaatagcaatatggctgatatgaaaccatctatttcatttaacgtagcaataggaagccttctcttctccgctttgattggtatgatcttcggtattttaccagcaaataaagcaagtaaactcgacccaatcgaagcattacgttatgaataataatagcattaatataaaaattgcttagacatttaaagagctgtcaccagctctttttttgagaacgatgaaaggtgatgttatgtatgacgctttaaaaagagtaatcaagtttttaggaattttttctattattctaacccttctgtgtttggtttatctttttaaacatttagatattttgaataaccctcatgctttagcggatgcgttgcgaggacgtctctttttgggaagcattatttttcttctgttgcaaattattcaggtggttattccgattattccaggtggggtgacaacggtagttggttttatggcttttggtccaatactgggctttattctcaattatgttggcattgttattgggagtattattctttttctattaacacgccgctatgggaagccatttattttgctatttatggaggagaaattatttgctcgttatgagcgaaaattaacgtcatcaacttacgaaaaagtttttgccttaaatatggcgtcccccatttcgcctgcagatattttggttatggtaacagggctgtcaaagatgacatttaggcgttttctctatatcattctgctttgtaagcctgtttctatcgtggcttatagctatttctggatttacggtgggcatttcattaaatcttttctgtaattttgctataataaaagcatgactattgcgattacgacaagtttgcgggaaaatgttgctctgcgtcagcgagcgcaagctattggcgaaaaacttcatttacctgttattgaacgacgaaaacaatcagtgacaaagcttttacagtctagagaagcgctttttttggtttatgaaaatgagctgcgcttggtcaatcaagacggtagtgagtttgtttttcaccctgatacagccatgttgcgtatcaagagtgagcatgacgctttattggcattattgggtgatgacaagttacaaatccttgatacaacgatggggcttgctagcgatagcattgttatggcttcagcaggcaatgatgtaacagcgatagaaagcaatcctcttatccactttatcgtttcagagggtttggcaacttatccatcagaaaatcaacgattaacagctgccatgcgttccattaaaacttattgcgctgataatattacttatatgaaatcgttgcctgataagtcatttgacgtggtttattgcgacccaatgttttctgataggatttcagaatctaaaaacttagatggtttacgacaatttgccaatcctagtcttttatctgatgagtttttgagagaagcaaagcgcgtggcaagaaagagtattattattaaagctcattttagagatgatgtttttgaaaaatttggttttaaaagaattgtcagacctaatcaaaaatttcattatggtattatggagttgtgatacgacagttaataatagaaaatagctttgagagagcttggaacaattgtttcagctctttttgtttttaaaataatattttcagataattatcatgtttttatttgctttttatgcaatttcatgctattttgaataaaaatatatttatgtaaattaaaatataggtttttagaaaggggatagaatgaaaagaaaagctgttttttcgctagtgttattagcatgtcttgtgactggtattttgggaatgaatcaaattaaaaataaagctgtggttgctgacgatgttcaagtcaagtccttcgagatatcaagtgataatgcgactataaatcgtttaattaaggtttggaaaggaaaatcgcgagaagcgtttgataactattttgcagattattcggacgagcagcgtattgttgccgatgaagaaggtggtattttggcttatgctgatggttacggtgatgaggaagaatcacaaaatagttatattcagtacgaagacggaactgttcatgagcttgatttaaaaggtccagaatcaacgacagttggcgaagcccgtcaggtcttatatcaatatttaaaataaattaaggagaagctatgaaaaaaagaatcatgttaccgattgctggtgctttagcgattgtatctgttggtacagctaaaacaattgtgtctgatgaattgacagccttacttcctaaaactgttgccgaaccgattactttacagcttgctgtggaggaatatcaaaaagataatagttttgtggagtttttggatacttattgttcagatactgattttgtcattggttatcctgatgaagtgggcggaggattttcatttaaagatgaagcaagttcggctgctgagccattggttggagaacttttggatgatgatggcaacgttgtctatcgagatgagcaagcagtgactgttgcggaaataaaagaagctattttgcaatctcaacaataatgcgctcctgcttatttttaacctttcaaaaaaatttaaaaggtgtcaagaaaaaaacttgacaccttatctttttatgatataataagttaagtgagttagtagcagagctattaaccaaaacaaaaaaatatagaaaagagactttatactaatggcagtaaaaatccgtttaactcgtatgggttctaagaaaaaacctttctaccgtatcaacgtagctgattcacgtgctccacgtgatggtcgtttcatcgaaacagttggtacttacaacccacttgttgaagaaaaccaagtaactttgaaagaagatcgtgttcttgaatggttgtcaaaaggtgcacaaccttcagatacagttcgtaacatcctttcacgtgaaggcgttatgaaaaaattccacgaatcaaaattctcaaaataatagagtacactaagaagaaagcctatggataccattgaaaatcttattatcgctattgtgaaacctttgatttcacaaccagataatcttaccattaaaattgaagatacacctgagtttttagaatatcatcttgatttggatgcacaggacatcggtcgtgttatcggtaaaaaaggtcgtaccattacagcgataaggtcgattgtctattcggtaccaactcaaggtaaaaaagtaagactcgttattgatgaaaagggagaagagtagtgatttgctactctttttctttttggtgaagaagtctcatattcatcggaactttttattagaaaatccgagattgcaaatcatcaatatacgttttgaaagctgactaaatgagaccaaatgttagcaacccccaaattttttcaaaaaaaattaaaaaatgtattgacagagcgtcaaatctacgatagaatatattttgttgttttggggtatagccaagcggtaaggcaagggactttgactccctcatgcgttggttcgaatccagctaccccagtaaacctcattggttttatacattgattttggtccgttggtcaaggggttaagacaccgccttttcacggcggtaacacgggttcgaatcccgtacggactatcttgaccagttgcagagcgcagctggttttttcattgctatcatggtacaatggtaaagactaagttaagtggagtaaacatgaattattttaatgttggaaaaattgttaacacacaaggtctccaaggtgagatgcgcgtgttgtctgtgacagattttacagaagaacgctttaaaaagggttcaaaattagcgatttttgatgataaagaccgttttattattgaagttgagattgctagtcaccgtaaacaaaagaattttgatattgttaaatttaaaggtatgtatcatattaatgatatcgaaaaatacaaaggttgcactttaaaagttgctgaggaaaatttatctgaccttgatgatggtgaattttattatcatgaaattattggacttgatgtttatgaaaatgatgttttgattggtcaagttaaggagattttgcaacctggtgctaatgatgtctgggtggtgaaacgtaaaggaaaacgtgatttgttgcttccatacattccaccagttgtgcttaacgtggatgttgctggcaatcgtattgatgttgacgttttggaaggacttgacgatgaagattgatattctaacgctctttccagaaatgttttcaccgcttgagcattcgattgttggtaaagctactgaaaaaggtctgttggaaatcaactatcataatttccgtgagaatgcagagaaggctcgtcatgttgatgatgaaccatatggtggcggtcaaggaatgcttttgcgagcacagccgatttttgataccattgataagattgacgctaaaaagccgcgcgtgattcttttggacccagcagggcgtaaattcgatcaaagctacgctgaagaattagcacaagaagatgaactaattttcatttgtgggcattatgagggctatgatgaacgcattaaaaccttggttaccgatgagatttctttgggcgattttgttttgactggtggagaattggctgcgatgacgattgttgatgcaacggttcgtttgattcctaatgtcttaggaaaagaagctagtcatcaagatgattctttttcatcagggcttttggaatttccacaatatactcgcccatatgattttcgtggcatgaaagttccagatgtgttaatgagtgggcatcatgagaatatccgaaaatggcgtattgagcaaagtttgcgtaagacgttagaacgtcgtccagatttattggaaaattatgtttttagcaaggaagaagaagctatttttcgaaagattctcgcagagaaagacgcgaaagctaaaaatatgtgatataataggagacatgcggactgtatgtctctttatttttgaggaggtttcatgcggacagaagaggtgattgttctttcctatcaagaaagttggaaagatgattttgaaaaaattgcgcaagagttgcgtgctgttcttggtgagttagctattagaattgagcatgttggaagcacatccgttgaaggcttagcagcaaagccaatcattgatattgatgttgtgattgctcaagagacggatttatctatggttgttgaaaaattagcaagtattggatatgttcatgagggaaatctaggaattgaaggcagggaagcttttgcttattctggtaaagagcatttgcaatgtcatcatctttatgtttgtcctgaaaattcacttgagttgaaacggcaccttgcttttcgtgattatttgcgcagtcatcctgatgcagttgcgatttatggagcaacaaaaatgaaagcagcgcagctatttcccaaaaatatcgaaagttacatggcttataaagcatcagtcatcgaagaaatttataaggagttggaaaaataaatgtcagaaaatcgtgaaatatatgatattaccgttattggtggtggtcctgcagggctttttgctgctttttatgcaggtatgcgtggtgtttcagtgaaaattattgaaagtttgtcagaacttggtgggcaaccagctatcctttatcctgaaaaagccatttatgatgtggctggtttccctgaaatcacagcagcagaattaactgaaaatcttatcaaacaattagaacgctttgaagaccaaacaacgatttgccttaaagaagaagttaagacttttgagaaagagggcgatgttttcactattgagactaataaaggtcaacatttttcacgtgcgattgttattgcctgtggtaatggtgcatttgctccccgtacgcttggtttagaaggggaagaagaatacgctgacaacaaccttttctacaatgttcataaattagagcaatttgctggcaaagacgttattatctgtggtggtggtgattctgccgttgactgggcaaatcatttggatggcttggctaaaagcgtgacaatcgttcaccgtcgtgatgctttccgtgctcacgaacatagcgttgaagtgcttaaacaatcaaatgtgaaaatcatgacaccgtacgtaccagttgctttggacggtgatggtcaatttgctaacagtttaacgattcaaaaggttaaatcagatgaaactgttgaattgccattagatgctttgattgttagctttggtttttcaacatcaaataaaaaccttaaaaattggaacgttgattataaacgttcaagcattacggtttcgccattgtttgagacaagtcaagaaggtgtttatgcgattggtgatgccgctgactatgaaggtaaagttgctttgatcgcctctggttttggtgaagctccaactgcgattaatcaagcgattaaatacatttaccctgaccgtgataaccgtgtggtgcactcaacatcattgattaaagacaaggaaaaataaaacgaaactctcttcacaagtgattgtggtaaccccaaaaagttagacaaataattattggaaggatttagttctgtattgcacatgactaaatccttttgttttagttgaaattgagttacagtcactatttttttgattttgcaggcattctaactagttagtgaaaaaacttgatagaatttgatagaaaatgcttgacaatgatagaaaaaatagtataattttatctgtaaacgatttcagtggaggtgatgaacattcttaagtctaaacgaaaacaattaatcatggaaaaattgtctcatgataaatttgttaatcttgaggacttagttagcatgctagatacctcggagtccactgttcgtcgcgatttggacgaattggagagtgagcgtaagctccaccgagtccatggtggcgcagaactccctcactcacttcaagaggaatttaccaatcaacaaaaatctatcaaaaacattcaagaaaaaatgttagtcgctcagaaagcagctgatttgattgctgacaatgaagttattttcattgatgcaggaacgacaaatgagttgctgctcaattatctctcccaagataatttaacggtagttaccaattccattcaccatgctgccaaattggttgataaaaacattcaaacgattattattggtgggcatgtcaaaaaagcaactgacgctagtattggaacggttgcgtatgagcaaattaaacaattaaattttgacaaagcatttttaggaattaacggtgtcgatgagcaattcttaacaacacctgatgttgaagaagcggtcatcaagaaaacggttattgaaaatgccagaaaaacatttattgttacagattcatcaaagattggtcacatttcttttgccaaggttgataaggttgaaaatgtcactatcattaccaatcaatctagcggagcactgatgaaaaaaataaaagaaaaaacgagggtaattgaagtatgatttacacagtcactcttaatccatctatcgactttattgttcgcttggatagtttagcacttggaagtgttaaccgtatgactagcgatgataaattcgctggtggtaaagggattaatgttagccgtatcttgaaacgtcttgatattgaaaatacagccacaggatttatcggtggatttacagggcgttttgtgaaagatggcttggtagatgaaggcattgcaacaaaatttgttgaagtttctgaggatacacgtattaatgtcaaagttaaagcgggtgaggaaacagaaatcaacggtgcaggtccacacatctcaacagaaaaacttgaagaattagaagctattcttgctggtctttcaagtgaagatactgttgtttttgcaggttcagctccaagtagccttggtaaccaagtctataacacattgattccgattgctaaaaaagcaggtgcagaagttgtttgtgattttgaaggacaaacgcttttagatgccttaaactatcaaccacttttggtgaaaccaaataaccatgaattagctgatatttttggtgttgaattaaacggtcttgctgatattgaaaaatacgcccgtgaaattctcgctaaaggtgctaaaaacgttattatttcaatggctggagacggtgcattgttggtaacaccagaagcagcatactttgcaaaaccaattaaaggcactgtcaaaaattctgtgggtgcgggcgattctatggttgcaggatttacaggcgaatatgtcaaatctggcgacccaatcgaagctcttaaatggggtgtcgcatgtgggacagcaacaacattctcagatgacttggcaactgccgaattcataaaagaaacttatcaaaaagtagaggtagaaaaattatgaaaattcaagacttgctcagaaaagatgccatgattcttgatttgaaagcaacttcaaaagaagcagctatcgatgaaatgatcacaagccttgttgaacatggtgtggtaactgattttgatacttttaaacaaggtatcatgaaccgtgaagcgcaaacatctactggtttaggtgatggtattgccatgcctcacagtaaaaatgcagctgtaaaagaagcaactgttttgtttgctaaatctgctgcaggtgttgattatgaagcattggacggtcaaccaacttacctattcttcatgattgcagcaccagacggcgcaaacgacactcacttggctgctcttgctgaattatcaaaatatcttttgaaagatggctttgctgacaaattacgtcaagtgacatcagctgacgaagtaattgcaacatttaacgcagcagaagaagataacaaagcaaaagaagaagcgaaaaccgccccagtttcagatgataaaccacttatcgtagctgttacagcttgtacaactggtattgcacacacttacatggcagaagaagccctcatcaaacaaggtgatgaaatgggtgtcactgttcgtgttgaaacaaatggtgcttcaggtgtcggtaatcgtttgactgctgatgaaattgcgcgtgcaaaaggtgttattattgcagctgataaagccgttgaaatggcacgttttgacggaaaaccattagtatcacgtccagtcgctgacggtattaagaaaacagaagaattgattaacatcattcttgatggcaaagcagaaacttacacagcttcagctgatgaagcatcatcttcaagtgatgctagtgaaaaattgagccttggtgctgcattctacaaacacttgatgagtggtgtttctcaaatgttgccattcgttattggtggtggtatcttaattgccatttcattcttgattgaccaatttatgggtgtgccaaatgaccaattgagtcaccttggtaattaccatgaagtcgcagctatctttaaccaacttggtaatgctgcctttggtttcatgattccagtatttgcagcttacattgcatactcaatcgctgaaaaacctggtttggtagctggtttcacagctggtgctatggcaacttcaggtattgctttcggtcgtatctcattttacagtttggatagcgcagtaaaccttgctgacaatcaaattgcctcaggtttccttggagctcttgttggtggtttcttagctggtggtgttattcttgttcttaagaaagctcttgccttcttgccaaaatcacttgaaggtatcaaatcaatccttctttacccacttcttggtgtgttggtaacaggattcttgatgctcttcatcaacatccctatggcagctattaatagtgctctctatggtttccttggtagcttgtctggtagctcagctgttatccttggacttatccttggtggtatgatggcaatcgatatgggtggacctttcaacaaagccgcttatgtctttggtacaagtagtcttactgcatcagcactttcaaatggtggttcagttgttatggcagctgttatggctggtggtatggttcctcctcttgcagtctttgttgcaacacgtttgttcaaaaataaatttacagatgaagaacgtgacgctggtttgacaaatattgttatgggactatcgttcatcacagaaggtgcaattccatttggtgctgctgaccctgctcgtgctattccaagctttatggttggttcagctgtaacaggtgctttagtaggtgcatttggcattaaattgctggctcctcatggtggtatattcgtctttgcattgacaagtaactggattctttaccttgttgctattgttatcggtgctattgtttcaggattactatttggtgcccttagaaaagctaaataataaattttattaatctaacattgaactccttagggagttctttttgttatttgttatagttaaaaactataataaactctaaatgtatagctaaaaactatatcaggccataaaaagatagaatgatgaaaggtattgaaaaaaggcttgttatcctttacaatcttaattataaaaaatttagtaggtatagtttaaaactaatgctggtataggaggtaactatggtaaaggtttcgaatttgggttatccgcgtttaggtgaaaatcgcgagtggaaaaaattaattgagtcttattgggcaggggatatttcacaagaagaattacaagctcaagctaaagatttacgtcttgaatttttgaaaaaacaagctgatgcagggcttgattttattcctgtgggtgatttttcactttatgaccatattttggatttgtcagtacaatttggtgtgattccaaaacgttttgctaaagaagaaatcaaccttgatttgtattttgcaattgcgcgtggtaataaagacaacgttgcttcatcaatgaaaaaatggttcaacacaaactatcactatatcgttcctgaatggtctggtgttaaaccacaattgacaaatacacgtttgcttgacttgtatttggaagcaaaagaggtggttggcgataaagctaaaccagtcattacaggaccaatcacttatgtggctctttcatctgaagttgatgatttcacagctgcagtgaaaaaattgttgccactttataaacaagtttttgcagaattggttgaagcaggggcaacttatattcaagttgatgagccaatctttgtgacagatgaaggggctgaccttttagaagcagcaaaatatgtttatgcttattttgccaaagaagtaccagaagccaaattgattttccaaacttattttgaagctttgattgatgccaaagatttgtcagagttaccagttgcagcttttggtcttgattttgttcatggtcttgatgaaaaccttgaagcaattgaagcaggttattttgcggataaggaagtttttgcaggtgtggttgacggacgtaatatctgggcaacagattttgtcaaaacatcagcattgctcgaaaaaattcaagccaatgtaaaaacacttgttgttcaaccttcttgctcacttcttcatgtgccagtaacgactaaaaacgaaacagaactcgaaccagttcttaaaaatggtttggcatttgcggatgaaaaattgcaagaaatcaaattgttgagccaacgtttagacggtgaagaatctgatgcttacaaacaacatgttgctgattttgatgctttgcaagcagctgatttccgtaatgtaacattggaaaatttggatgatgttgctactgaacgtgttgactataaagttcgtcgtcaagtgcaacaagaaaaacttggtctgccaattcttccaacgacaacaattggttcattcccacaatcgccagaagttcgccgtacacgtttggcttggaaacgtggcaatatttctgatgcggaatatgaagatttcattaaatcagaaatcgcacgttggattaaaattcaagaggatttggacattgatgtgcttgttcatggtgaatttgaacgtgtggacatggttgaattcttcggtcaaaaactagctggtttcacaacaacaaaacttggttgggttcaatcatatggttctcgtgctgttaaaccaccaatcatttatggagatgttaaacacattcaaccattgactgtgaaagaaaccgtttatgctcaaagcctgactgaccgtccagtaaaaggaatgttgactggtccaatcactattacaaactggtcatttgaacgttctgacatttcacgtgctgatttgtttaaccaaattggtcttgctatcaaagatgaaattaaattgcttgaagatgcaggtattgccattattcaagtggatgaagcagcgcttcgtgaaggtttgccacttcgtaagagtaaacaacaagcttatcttgatgatgccgttcatgctttccacgtagcaacatcatcagtgaaagaagaaacacaaattcatacgcacatgtgttactctaagttcaatgaaatcattgattctattcgtgctttggatgcagacgttatttctatcgagacaagccgtagccatggtgacgttattgaatcatttgaaacagctgtttacccgcttggaattggtcttggtgtctatgatatccactctccacgtgtaccaactaaggaagaagttattgccaacattgaacgtccattgcgtcaattatcacttgaacagttctgggtaaaccctgactgtggtcttaaaacacgtcgcgaaccagaaacagtagcggcacttgaagttttggtggctgcaaccaaggaagtccgagctaaatacggaaaataagaaaggttatgctatgtcacgattattagaacgtttaaaaacagatattctggtagccgacggtgctatgggaactcttctttacgccaatggtcttgacaactgctacgaagcttataatcttacacatccagataaaatttcagccattcatcatgcttatcttgaggcaggggcagacattatccaaaccaatacctatgctgctaaacgccatcgtctgaaaggctatgcttatgatgaccaagttaaggaaatcaatcaggctggtgttaaaattgctagggaagctgcaggtgatgatgcttttgttcttggaactgttggggctcttcgtgggcttaaacaatgtgatttaacccttgatgaaattattgaggagactttggaacaagtcgggtatttgattgaaacgaatcaaattgatggtttgctttttgaaacttattatgatgaagaagaaattatcgaagttttaaaagctgttagaccgataactgatttgccaattatcactaatattgctctccatgaagctggaattacggaaaatggtcgtcctttagttgaaattctaggaaaattagtcatgttaggtgctgatgtggttggcttgaattgccacctcggtccctatcacatgattaagtcactgaaacaagttccgctttttgctcagtcttatttgtctgtttatccaaatgctagtttgttgtcttttgttgatgacaatggcagcggtcagtatggctttagtcaaaatgctgattatttcggaaagagtgcagaacttcttgtggcagaaggtgcgcgtttgataggtggttgttgtggaacaacgcctgaccatatcagggcggtaaaacgtgctgttaaaggattaaaacctgttgaacgaaaatttgtgacaccaatggttgaagaagcagagcttatcaaagcggctaaacaatcagagacattggttgatagggtcaaaagagaagttacgattattgcggagttagacccaccaaagacgcttgacattgcgaaatttacggaaggggtaaaagccttagacaaagcaggaatttcagccattaccttagcagataattcgctagctaagacgcgaatttgtaatgttagtatcgcggctctattgaaaaatgagatttcaacaccgtttcttttgcatttatcctgccgtgaccataatatgattggtttgcaatcgcgacttttgggaatggacgttttaggatttaatcatgttcttgccattacaggagatccgtcaaaaatcggtgattttcctggtgccacaagtgtttatgatgccacaagctttaaattgttagcactcataaaacagctcaataaaggtcaaggatacagtggagctagtatcaagaaagagaccaattttacagcagctgcggcttttaacccaaacgtcaaaaatctatcacgctgtggtcgtttaatcgaaagaaaggtagcggcaggagcagattatttcatcacacaacctgtttttaacacagagattattgatgaattagccgatttaacacgagattatgaagcgccattttttgtaggtatcatgccgattacaagctataataatgctattttccttcataatgaagttcctggtatccaactatcagatgagtttttagcaaaattagaagctgttaaagatgataaagaaacctgtcaaaaattggctttggaagaaagtaaacaattaattgaccgcgctttggagcattttaatgggatttatctcatcacaccatttatgcgctatgacttgacagttgagttgattgattacattcaccaaaaagttgagttaaaaaatcaaagaatatcttaaaaattgagaatgggaaagctgggacaaaagtgcccagcttttttagctacaagatatgttgattgggcttttaaaatctgaagatgagagcaaaagtggagaaaaatattttttgagttgttttggctagaagcgttatagcagtaaattttcatcgttttttgttataatagacacaaataaattaggatttaaggggaagaaagatgaccttgataaagcacaaaaaggtggaattgaccgagttgttctatgatttggttttcgtttatgccattagccaaatcacaacattgattcaccatgttcatcatggtattgtaataccatatgcttttttcacgtttgttattgccttgattatttttgtcaattcttggatggtgcagacggtattcacgaatcgttttgggcaaaatagtttaaccaatattttatttatgtttgcccaaatgctgtgccttttgatttcatcaacggctgtgacagaagaatggtcaacgagttttgtgccatttattttaccaatggcgtttatttctctgcttcttttattgcaatatgtgattgagtatttcaatactaaggtagaagcagactgtgatttgattcgtcaatatttttatattttgggaatacgttcgctgactttgtttgtttcaatctttttgccttatcaatttgggctgattctggcggtttctggtgtgttattaacgtggattttacctggtattttaaccaatcctaaacaaggtcatgtctcagagaaaacacgtgccattaattttccacatttggtggagcgtttatcgcttctggttatcatcactttcggtgaaatgattatcggcatagcgccgtatttttcagtagataatctgtctgtggcttctttcttgattttcatcatcgtaactaatctttttatgatttacattgttgaaattgaccacatgatagatgtcaaccaagaccgtgtgacaggaaatggcgcaatctattaccattatcctatttttctagggcttagtttgattacagtttccctaagttttataggaaatcaagcggcaaataatctgttttcgatttgccttctttatcttgggattttactattactgtttggtgtttttgcacatcagcattataataaatcaagtcatcaatttaccaataagctttattgggttgaatttggtatgccaatactaggactgcttttgagtttcttgacgcttcaatccgcatttgctttaattgtaattgcttgtcttgtgacacttatcatgatgattgttatgatttcctttaatctaaaacgaatttaatgtgagagtttatcaacttttggggttgataaacttttttattttttaaaataatgtttttacttgacttggagttaactccaaggtgtacaatgaaaacgtttagaaaaatagaaatttattggaggtttcgtatggaatacacaaaattgggaaatacaggtcttgaagtgtcaaaattatgtcttggttgcatgagttttggtgatgctagtcttggttttcattctggttggcttttagatgaagaaaaatcacgtatcatcattaagaaagctttagatttgggcattaactttttcgatacagcaaatgtttacggaaaaggaacaagcgaagaataccttggtcgtgctcttcgtgactttgcggaccgtgatgaagtgattattgccactaaggttttctttggtgatggtttacacgagggacgaaatacaactggtttgtcacgaaaagcaatttttagtcaagtcgaagctagtcttaaacgtttaggaacagattatattgatgtgctttacattcatcgttgggattataacacaccgattgaagaaactatgtctgcacttaatgatttagtgcgctctggtaaggtgcattatcttggtgcatcagcaatgtatgcttggcagttccaaaaagcgcagtatgtggctgagaaaaatggttggacaaaattttcagtcatgcaaaatcattacaatatgctttatcgtgaggacgaacgtgaaatgattccgttttgtaaagattcaggtgttggtttagcgccttatagtcctttggcagcaggtcgcgtggtgcgcgattgggatgcggatactgcacgtagtaagacagatgaaacagccaaaatgaaatacgatagcaccgaagaacaagataaagctatcgtagcgcgagtggcagaagttgcagaaaaatatggtgttactcgtgcccaagttgctcttgcttggctatggcaaaaagggattgactcaccgattgttggagtgacaaaagaaaaatacctagatgatttcatgggggcttttgatgtgactttgacagatgatgatatggattatttggacgaaaactatttaccacataaaattgttggggctttgtaaggtgactttttaatcttttctttcatttcaaagcgaaaggagaaagcgatgcaatacgtaacactcaacactgggacacagatgtctcagttgggatttggtgtttatcaaattcctgaaaaagagacagagagaattgttagtcaagcgataaaaacaggctaccgtcacattgatacggcacaatattatcgtaatgaagttggtgttggtcaggcgattaaggcgtctggtttgccaagagagaactttttcatcacaaccaaattagcaacatcaggttatcgtgcgacaaaggcacagattgcgcaggctttaaagaatttgcaaacagattatattgatttaatgttgattcattgggtagtatctgattacgaagggacttaccaagctttgcaagaagcttatcaggcaggtcaattaaaagcaatcggtttgtcgaattttaaccaagaacaaatcaaaggaattttagctaaattttctgtgaaaccagcggtgctccaaaatgaaatgcacgtttttcagcaacaagttgctatgcgacaattttgccacgaaaatgatattcaatttgaatcttgggcgccctttggcgaaggcaaggaaaatattttcaatcatcctttgttaacaacgattggcagccaatatcacaagacagctgcgcaggttattttacgctttttacttcaagaaggtgtggtagctattccaaaatcagccaatagtgagcggatgaaagagaattttgaggtttttgattttgaattgtctgctaaagatatggaagcaattcgtcagcttgaccgtggacatggtttatttggttggaacgaatgagacaggaaaggagtatcaaaatgaagatttttgtggcaggttcgacaggtcgtgtagcgacagaacttttgaaaaaattatcagcaaaaaattaccaagtgattgcgggtgctcgtcgtccagaagcagttgttgaactgcccaacgttacaccgcagaaaatggatttgcatgcttcggttgataatattgcagaacttttaaaaggtgttgatgctgttgtgtttacggcgggttctcgtggtaagaatttgctacaaaccgatgcctacggtgctgtcaaattaatgcaggcagctaaaaaagctggcattactcgttttgtgatgttgagtgcactttattccttaacacctgataaatggccagataatctgactgattattatatcgctaaattctttgcggataattatctggtgaatcaatctggtttggactacacgattgttcagccaggaaatttattggaagaagcagggcaaggtcacattgttttgggagataaaggctttaccgctatttcaattgaagatgtggcgagtgttttagcagaaattgttgacaaaccgtcaacttttaaacgtgtgattgcgattaatcctggtagcacagccatttcacaattatttgattaaatgcaaaaaaatgcttgacttagagttgactctaaggtgtatgataaggacacttggaaagtttaatgactttcagaagggaggattctgatgtcgaaatcattgattatttacttttccattacaggaaatacgaaacgtgtcgcacagcaaatggcacgtaaaataggcgctgatttgtatcaaattgacgttgaaaatccctatacaagtaaggatttagactggataattccaaattgtcgtgccaatgttgaacaaaaagattcagccagtcgcccagcttatcacgggaaattgcctgatattagccaatatgacacggttatttttggtcatccgatttggtggggaattccgccacgtatcatctatacggtcatcgaagctttggacttgactgggaaaaaggtcgctagttttgcaacctctggcggttcaacttatagcgatgcccagattgaaatggatcatttgctgaaaaatcctgtcaaggggcgtattttatcaagtgaaacgtcgattaatagctggttggcagacaatggtctgattagttagtttattattattgaaaaaaattaaaaaagtatttgacttggagtgcactccagggtgtatgatagcattacttgcaaaaattagtgagtttttagctgatttttgaagatattaatcaatttgagaatagaatgttatgaaacttttcaattgattcttagatgaaagaaggagaatttatggtacttgaaacaatttcatcaccacaagatttaaaacaattatcacgtgaagatttgcaccgtgttgttgatgaagcacgacaagcgcttcttgaaaaaacaagccaacatggtggacacaacggaccaaactttggtatggttgaaatgacagttgctatgcactatgtctttaattcaccagtagataaattcatttttgacgtgtcacaccaatcatacgttcataaaatgttgactgggcgtgcgcaagcttttcttgacccagcgcattatgatgacgtatcaggttacacaaaccctaaagaaagcgaacacgacctcttcacagtaggtcacacgtcaacatcattgtcacttgcttctggtgtggctaaagcgcgtgatttgaaggatgaagcttataatgttgtggcggttattggtgatggttctctttcaggtggtatggcgtatgaagggctaaaccaaatcgcaacagaagggacaaatacgattgtcattattaacgataacgaccaatcaatcgctgttaacccaactggcggtatttacacagcactccgtgacttacgtgaaagcaacggtcaagctgataataatctttttaaagctcttggttttgattatcattaccttgacgcaggaaataatctcgaccaattgattgctttatttgaagaagtcaaagacgctagtcacccagttttgctacacattcatacgcaaaaagggcatggtgtgtcattcatggaagaaaatcgcgaagctttccatgcgggtggaccatataatcctgagacaggagaatatcttggtggtgcaggcgctgctgaaacatacaacagcattacaacagattttgtcttagataaaatcaaaaatgactcaacagtagttgccgtaaatgctggaacaccaatgtttatgttgagccaagaccaacgcaaacaagcaggtaaacaatttgttgatgtgggtattgctgaagaagaagcggctacaatgtcagctgggcttgctaaaaacggtgcaaaaccagtctggtatgttgcttctacatttatgcaacgtacttatgaccaatggtcacatgacattgctttgaataatttgccagtaacagcccttgtttacatggcgtctgttagctctttgaacgacgaaagtcatcttggtttctttgatattccattcttagctcacattccaaacgtggtttacttggcaccaacaagtaaagaagaacatcttgccatgcttgattgggcaattgagcaaaaagaacacccagtagctatccgcattccagttggtccacttcgtgaaactggtattgctgatacgacagattattcaattcttaataagaaccaagtgactcaaaaaggtagtcaagtagcgctctttggtcttggtaatttctacggattggcagaggaagttgctaaagaattggctgacaaacatggtattacagcgacaattgttaatccaaaattcatcacaggattggacgaagaattacttgatagtttagaagctgagcaccaagtcgtggttactttggaagacggtattttagaaggtggctacggtcaaatgattgcaagctaccttggtaatacggaaattaaagtccaaaattacggtgttgaaaaagcctttcatgaccgctacaatgcgcaagaattgttagcagaaaatggcattactgttgaaaatatcgttaataacattttaaaaaatttggcagaataaaaacttttcagtgtaagtaacagtcaacatgataaaaggcaaaacttgccttccaagaagctgagaccaagtgctcagcttctttgtttatgcagttatatgccgtttgaatttcaataatctggaaatagattgttaaaggtcgctgtcaaggcatattaaaacagcgctagtcacctttggttaatttagatttcccatgctcaattgattaggcactttttaatgtttgctttgtaagctagatttccaacctcaaacaatcaattactgggtttttaatgcgctgataaatcggcactcttttgggtgctgatttttatttttgacaacagttatcagtctcttttttattaaaaatttgttatactgaaaggtgaatttgcgaaaggattgacagatttggcaaaaacaagaaaacgaaaggttagaaagaaagcgagaagtcatcgtcggcagaaaaaagttcctaaatgggctttatacggcatgagtttgttggcggttttagcttgtgtcgctttagtgattttcacttatcaagcacaagatgcagataatacggcaactgctgacaccacaagttctactacaatatctgaccaaataacgataaattttattgaaagtattggcgaatccgcacggcaaattgctgcgcaaaatgacctttatgcttcggtgatgattgcgcaagcgattctagaatcaaacagcggtcaatcagctctcagtcaagcacctaattataacttttttggcataaaaggggactacaatgggcaatcagtcacgatgaaaacgtgggaagatgacggaagtggtaatgcttataccattgatgcccaatttcgctcgtatggtagccaagcagagtcattggaagattatgcccaatttctccaaaaagatatttatgctggtgtgcataaatcaaacacaacttcctacaaggatgcgactgcagctcttacaggtacctatgctacagacacttcatatggaacaaaacttaatcgactgattgaacaatacggacttactgtttatgatagttggtgagtgtgactttttgcattttttcgataaaaagaatgttcagtattatttcaaacttcaaagaaaaatgtgcaaaatataggctatttatgctataatgaatggtgatatacaaaagaggagaccagtatggaattagtacgcgaaaaagaatttgtaaaccagtaccattatgatgcaagaaatctcgaatgggaaaagaaaaatggtacaccaaagactaattttgaagtaacttttcaattagtaaaaaaagatacagaaaacaaccaaacaacgattgtatcagtattacaatttatggtcgttaaaaaagaattcgttatcagtggtgttgtgtcacaaatggttcacattaaaaatcgtattgttaacgaaccaagtgaattcaccaaagaagaagttgaaaatttagccgcaccgctattagacattgtgcaacgcttaacgtatgaagtaaccgaaattgccctagaccgtccagggattaaattggagtttagaaactaatgaaattagcagttattacagatacaaccgcagttttgtcagatgacatcaaacaaaaagagaaccttcacattttggatattccaatcatgattggtgggattagctacgttgaaggtaagaacttgagcttggatgatttttacaagaaaatggcaatgtcgcctgttcttccgaaaacaagccaaccaagtttggcaaaattagacgagattttgtcacagttgtcttcagaaggttacacacatgtcatcggtttattcttatcttcaggaatttcaggattttggcaaaatattcaatttctagttgacgattatccagaattgaccattgctttcccagatagcaaaattacttgcgcaccgcttggcagcatggtaagaaatacgttgaattgggcagaagctggtatggatttcgacgatattttagccaaattgcaacaacaaattgacggaacaagcgcctttattatggttgatgatttgaatcacttggtaaaaggtggacgtttgtcaaatggctcagcacttatcggaaatttgcttagcatcaagccaattctttattttaatgacgaaggtgttatcgaagttttcgaaaaagtgagaactgagaaaaaagctatcaagcgtttagttgacgttttgtctgaagtgactgttaatggtgattacgaagttttcatcattcattcgcgagcagaagaaaaagcgcaacagttttatcagactttagctgacagaggtcaggctgaaaatcttaaaattgttacatttgatggtgttattgctactcatttaggggaaggcgcagttgcatttggtttcacaccaattgtttaagtgttagagaggaaaaaacatgagtattaaagttatcattgcaggttttaaaggacgaatggggtcagcagcagttaatatggttaagggagatgacgaattaaccttagtcgcattgcttgacccatttgcgacagaatcagacgtggatggtgtcccagtatttacagacaaatcacaattagttgggtttgatgcagatgtttgggttgattttaccatgccagcagttgcttatgaaaatacccgctttgctttggaaaatggcttcgctcccgttgttggaacgacaggattttcagaagatgaaattgctgaattaatcgctctttctgaagaaaagaaaacaggtggtttgattgctccaaactttgcaattggtgctattttactcatggaatttgccgctaaggctgccaaatattttccggaccttgaaatcattgaattacatcatgacaataagaaagatgctccttcaggtacagctgtgaaaacagcggaattgattcgtgaagttcgtcaacctaaaaaacaaggggctgcagatgaagttgaaacgttaaaaggagcgcgtggagctgattttgatggtatgcgtatccatagtgttcgtttacctggcttggttgcgcaccaagaagtcatcttcggtgcccaaggtgagggattaacacttcgtcatgattcttatgatcgtatttcgtttatgagtggtgttaatattggaattaaagcagttgtcaaacgagataaactcgtttatggtttggaaaaattactatgaaattaaacaatctgccttctgaatttcaggaggctttaccaatcttgaaaaaaattcgcgaagctggctacgaagcttattttgtcggcggtagcgttcgtgatgttctactaaatcgtccgattcacgacgttgatattgcaacaagttcttatccagaagagactaaaagcatttttcatcgtacggttgatattgggattgagcatggcacggttcttgttttagaagaaggtggcgagtatgaaatcaccactttccgtacagaagatgtttacgtggattaccgcagacctagcagcgtgtcatttgtgcgttctctagaggaagatttgaaacgtcgcgattttacggtcaatgcttttgcacttgatgagacaggtttaattattgataagttcaacggtttggcagatttggaagctaagttattacgtgcggtgggaaatcctgcggagcgttttaacgaagatgcgctgcgcattatgcgcggtttccgttttgcggctagtcttgattttgatattgaacctgatacgtttgctgctatggcagcacatgcgcccttacttgaaaaaatttcggtagagcgctcttttattgaatttgataaattattgatggcacctttctggcgtaaagggattaaagccatgattactagtcaagctcaaaaatatttaccatatcttgagaatgctcatgataatttacagcaattacttgacgatttggcttgtgattatcactttaaaacgtctgaacaagcttggtcagctttgctattagctttagatgtcaaagacgttcgtgtctttttgaaagcatggaaaacatcaagtcaattccaaaaagatgtcgaaaagattgtggctatttaccgtttccgtctagaaaatgagcttgataagatggaaatgtaccgttatggcagttgtttgattgaacaagcagaagatttgcgtgctggttttggtttgccagttgattttgagcgtattgagcgtttagataaagaattaaccattcatgataaacacgaaattgttatcaatggtggagttttaatcaaagaattacaatacaaacctggtccagaattagggcaggtattaaaagaaattgaggaaaaaattgttcttggtgagcttgccaatgacaaagaagctatttttgactttattagaaaggaaaacaaatgagtgattttatcgtagaacacttaacaaaatcagtcggtgataagactgtttttcgtgatatttcctttattattcatgattttgaccgcattgggattattggtgtcaatggaacggggaaaacaacgctccttgatgtcatttctggtcgtcttggctttgatggcgacgtatcgccgttttcagctaagaatggttataaaattgcttatttgacccaagagcctgaatttgatgatgataaaactattttggatacagttttgtcgtctgatttgcgtgagatgactttgattaagacctatgagaccttgatggctgattacaatgaagctaatcaagctaaacttgaaaaagtcatggcagaaatggattcgcttgacgcttgggcgattgaaagtgaagtcaaaactgttcttacaaagctaggtttggacgatttgtcacaaaaagttggtgctttgtctggtgggcttcgtcgtcgtgttcagttggcgcaagttttgttaaatgatgcagacttgttattattggacgagccaaccaaccacttggatattgataccattgcttggttgacgaatttcctaaaaaattctaagaaaacagtgcttttcatcacccacgaccgttatttcttggataatgtggcaacgcgtatttttgaattggctaatagtcaattgactgaatatcaaggaaattatcaagattatgtgcgtttgcgtgcggagcaagatgagcgtgacgctgcaacgcttcacaagaaaaaacaactttacaagcaagaattagcttggatgcgtacgcaaccacaagcgcgtgcgacaaaacagcaagctcgtatcaatcgtttcaatgagttgaaagctgatttgtcaggagcaacacaatcaacagagcttgagattaattttgaaacaagccgaattggtaaaaaagttatcaattttgagaatgtttcctttgcttatcctgataaacagattttgactgactttaaccttttggtgcaaaataaagaccgaattggaattgttggtgataacggtgtcggcaaatcaacgcttcttaatttgataaatgatgatttgcagccgacagctgggaatcttgaaattggtgaaacggttcgcattggctatttctcacaattgacaaaagacatggatgaaaacaaacgtgtcatcaattatttgcaagaagtagctgatgaggtcaaaacaagcgttggaacaacaagtgtcacagatttgttagaacaattcttattcccacgttcaacacatggcacattgatttcaaaattatctggtggtgagaaaaaacgcctttacctgttgaaaattttgattgaaaaaccaaatgtgcttcttcttgacgaaccaaccaatgaccttgatattgcaacattgacagttcttgaaagtttcttgcaaacattctcaggaccagttatcacggttagccacgaccgttatttccttgataaagtggctaataaaatcttagcatttgaaaatgggcgtgttcgcgaattcttcggaaattatacggattatcttgatgaaaaagcgtttgaagaaaatgccgtagtggaacaagctaaaaaagcgccgtcacaaaagactgagaaggaaaaaacgaagaagaaacgcatgtcttactttgaaaaacaagaatgggaagtcatcgaagatgagattgccaaacttgaagaggacatcgaaactattgaagcgcaaatgcaggaaaatgccagtgattatggcaaattagcagagcttcaacgttcattagatgaagctaatgaaaccctacttgaaaaatatgaaagatacgattatttgagtgacttagctgaataagcatggtcactctttcttgcagaaagaaggtatttcgttacttaaaaatagagaacagattagaaaggaaagttactatgaaactagtttggacttatttgaaaaaatatcccaaatggctcattttggatgtattaggagcttttacatttgtcgtggttaaccttgggttgccaacagcactagctcgtatgattgaccaagggataacagttggaaataaagataaggtttatttttgggcaattgttatgtttatcgtgattattgttggagcgattggtcgtgttactttggcttatgcggcaggaaaaatcacgactaatatgattaaagacatgcgtaatgacatgtacgataaattgcaggaatactcacaccatgaatacgaacaaatcggtgtgtcatcacttgtcactcggatgacaagcgatgcatttattcttatgcaatttgctgaacaatctctacgtatgggggttgtaacaccgctcatgattatttttagtgttgtcatgattctggtaacaagtccgtctttagcatggattgttgcggtggctattccctttttggttcttgtggtttattacgttgcgacacgcacacgtcctttgtctgaaaaacaacaagccacccttgataaaattaaccaatacgttcgtgaaaatttgactggtttgcgtgttatccgcgcctttgctagagaagattttcaagaagaacgctttgatagtaaaaatgaagactataaaggcatttcaagtcgtctgttcaagctaactggtttaacagagccatcatttgtctttatcatcatctcaatgattgttgccattgtttggtttgccttaaatccgctctcaagaggtgatttgcagattggtaatctggttgcttttattgaatatagcttccatgcgctcttttcattcttactttttgccaatctctttaccatgtatcctcgtgttgttgtctcaagcgagcgtatttcagaagttatggcaatgccaatttcaatcacacctaatgaaaatggtgtgactgagactgaaacaaaaggttatttggaatttgacaaggtgacctttgcttaccctggtgagacagaaagtccagtcttaaaagatatttcctttaaagccaagcctggcgaaaccattgcctttatcggctcaacaggttctggaaaatcttctcttgtcaatctgattccacgtttttacgatgtcacacttggtaaaattttggttgacggtgttgatgttagagaatatcaattgaaagctctacgtcagaagattggctttattcctcaaaaagcgctcttgtttacgggaaccattgccgaaaatctaaaatacggtaaaacggatgcaacagttgatgaactgcaagaagcagcagatgttgcacaagcaaaagaatttatcgaaagccgtgatgagcgttaccaaacacatttggcagaaggtggtagcaatttatcaggaggacaaaaacaacggttgtccattgcgcgtgcggttgttaagaaacctgatatttatatttttgatgattcgttctcagctcttgattataaaacagatgcgcaattgcgtgcgcgtttgaaagaagttactcaagaagcgactgttcttattgtggcacaacgtgtgggaacgatcatggatgctgaccaaattatcgtccttgataaaggtgaaattgtgggacgtggtacacatgatgaattgatgcaaacaaacacgatttatcgtgaaattgctaactcacaattgaaaaatgcagacgagatgaaaggagaataacaatgtcaaaacgcaacgtttttctacgtttatgggattatctccaacaatataaaggtgcgctttttcttgccattttcttgaaagttttcagtagtgtcatgagtgtattggaaccttttattttagggcttgccattacagaattgacggcaaaccttcttgacatggcgcacggtgtagcaggtgctcatatcaatatttcttatattgcaatgattttagccctttatttcttgcgaggtttgggttatgagctaggaagctattggtcaaactatttcatgactgacgctgtgcaaaaaagtattcatgatttgcgccgagatttaagtgaaaaaatcaataaaattccagtttcttattttgacagtcaacaattcggaaatgtcttgggacgttttacgtcagatgttgaaacagtttcaaacgctttacaacaaagctttcttcaaattatcaatgctttcttaaccattttcttggttatttgcatggtgctttacctcaattggcgtttggctttggtggttattttaatcattccaatcacttatatcagtgctcagtttattttgaaaaaatctcaaccctatttcaaaaaacaagctgacgctctcggtgatatgaacggttttgttcaggaaaatctaactggctttaacgttatcaaactttatggtcgtgaagaaatttcaagtgaagaatttcgtgaaatcactcaaaatttgcaagaagttggtttcaaggcaagctttatttcaggaattatgatgccagttcttagtgcgatttctgatatggcttacctgattgtggcagttttgggagctttgcaagttctttctgggaacttgacggttggtaatatgcaagctttcgttcaatacgtttggcaagtcagtcaacccgttcaaaccattacacagttggcaagtattcttcaaagtgccaagtcatcacttgaccgtatctttgaagttctagatgagccagaagaagttgctgatgtaacagagcatttgacacatgatttaacaggtcaagttagctttgaaaatgtttccttccaatacgtggcagacaaaccattgattcaaaatttcaatcttgatgtcaaaccaggtgaaatggtggcgattgttggtccaacaggggctggtaagacaacgctgattaatcttttaatgcgattctacgacgttacctctggttcgattaaaattgatgggcatgatattcgcaacttgtcacgtcaagaatatcgcaaacaatttggaatggtcttgcaagatgcgtggctctacgaggcaagtatcaaggaaaatctccgttttggaaacttggatgcgacagatgaagaggttgttgaggctgctaaagctgccaatgttgaccactttattcgcacgctacctggtggttacaatatggaaatgaaccaagaatcaagcaacgtatcgcttggtcaaaaacaattgttaaccattgcgcgtgccttgcttgctgaccctaaaatcttgattttggacgaagcaacgtcatctgttgacacacgtttggaattattgattcaaaaggcaatggctaaattaatggaagggcgtacaagctttgtcattgctcaccgcctatcaaccattcaagaggctgataagattttggtgcttaacaatggtcaaatcattgaacagggcaatcatgaaagtttattagctgcgaaaggtttctattatgacctttacaatagccagtttgccaaaagcaaataagcataattattaataaaaaacaggattttgttttaagcaagtcctgttttcttattcttgcattttttagtcattgaatatctgttgcaaagatgatatgatagtaacgttaataataacgatgtttgggaaaagccatcgctaaaaaaaaccagcctaatgactgaattagcgcccttgtggattcccatgagggcttttcttttgcccaaatatctgaaaagatatagaggagataagatgaaacgtcaatctgcacttgtcgtctttagtggcggacaagattcaacaacttgcctattttgggctttgaaacattacgaccacgtggaaactgtcacgtttaattatggtcaacgtcacagtttggaaattgaagtagccaaacacatcgctgccgaacaaggggttaaaaaccatttgctagacatgtctttattaggacaattaactgaaaatgccttgactcgtgattttgcaatcgaaaatccagatgacgatttgccaaatacttttgttgatggtcgaaatcatttgtttttatcgtttgcggctgtgctggcgaagcgtcttggtatcacagacattattactggcgtttgtgaaacggatttttcaggttatccagactgtcgtgatgcctttgtcaaatcactcaatgttacgctgaatttggcaatggattataattttgttattcaaacaccgctgatgtggcttgataagtcagaaacatgggaattagctgaccaacttggcaaatttgattatgttcgagaaaatacgctaacgtgctataacggcattaaaggaagtggttgcggtgaatgtcctgcttgcaagcttcgtcaggcaggtcttgaaaaataccttgcaaagaaagggcaagcctaatgtttgaaataccaaaagagctaaaagtcccaacgggtgaatccttggtttattgcccacgtcgtgtcatggtttcaaaagaattcacctttgatgcggcacaccatttgttcaattatgatggtaaatgtaaggctttgcatggacatacttatcgtttgcaaattgcggtttctgggctgcttgatgaccgtggcatggcagttgattttggcgacctcaaacagatttacaaaaaacatttggaaccaagtttagaccaccgttacctcaatgaaagcttgccctacatgaacaccacagcagaaaatatggtttactggatttttaagcaagtcgcgcagcatttgccaaaagaacgtgagattcgtgtagaatatgtccgcttgtatgaaacgccgacatcatttgcggaatttagaagggagtgggagattgatgactaaacgtcagttaacccttccgattcttgaaatttttggtccaacttttcaaggtgaaggcagagcgattgggcaaaagaccatgtttgtgagaacgggtggctgtgactatcattgcgattggtgcgattctgcctttacttgggatggttcggaaaagcctaagcgaatgactgctgatgaagtgattgagcagcttgaccaattgggaacctacgattatgtgactttatcaggtggcaatccatgtttattggcgaataatatggcagagcttgttgccaaattaaaagcgcgtggggtgaccttagctattgaaacgcaaggctcacgctggcaaacgtggctaaaggacattgaccaagtaacgcttagtcccaagccaccgtcaagtaagatgacggttaattttgaaacgcttgattttattgtttcgcaattgaaaaaagaccaaatcacctttaaaattccagtttttgatgatgccgatttggcatttgctaaaatgattcaaaaacgttatcagcctgatgttttgtatttatcagctggtaatccagaaccgcatgccaacggcaacatcgtggagcaccagctcgaccgcttacgacaactatgggatacagtagcagctgacccagaatggcaaagcgtgcgcgtgttgccacaattacacacgcttttatatgacaaccaacgcggtgtttaaaaggagaatgagatgactagaacagatgaaatgaaagatttgacccttttgggaaatcaaaagacgacttacacttacgattacgacccaagtattctggaatcatttgataatcgtcatgttgacaatgattactttatcaaattcaattgtccagagtttacatcactttgtccgattactgggcaaccagattttgcgacgatttatatttcttatataccagataaactttgcgtggaatcaaaatcattgaaactttaccttttcagctaccgtaatcacggtgattttcacgaaaattgcattaatacgattggtaaagatttgattgacttgcttcagccacgctatcttgaagtctggggaaaattcacaccacgtggtggcttatcaattgacccatattttaattacggaaaaccaaataccaagtatgaaaaaatggcagattatcgcctaatgaaccacgacttgtatccagaaaccattgataatcgttaattgagaactataaaaaggacttcgtttttttttaaacgaagtctttttttagtcttagttaaatacggaatgaaaaagcgattcctgaaacaccaactgccattaaaagtaatcctgttagacgcccaataaaaatagctgaaagtgcaggattgaataagaggaaaagccctagaagaatggcaaggaccgcagagcttaggaaacgattagcgtcgtaaaaacctgctctacgcatttggaagccaccaattaaacgaaggataccgctaatgagaatccaataagcagcaatcgtgataacagcacttgataaagacatggctgagcttgataggagaataattccaaaaataatcgataaaatactttgcaacaaataccaaaatgatcgctcgacactattggtatacatcaaaaggctggtgattccagacatgaaaactaataaagcgattatccaaccaatcattgcagtcgtggtaaaaggatgcacaaaaagaaaaatgccaataagtagtgccagaatacctgaccatagtgataaacgtttcataatatacctcctaataatatacccctatattaccataattttcgcgaaaaggagaggataaagcctgccagaatgacgaaatttcccacacgacttcacatacgatgttatattttgtgacataaaaacgtaattttttcaaaaaaagtacaataaatacttgacaagaattttcagaaaatttataatattttttgtagtctattgattacacgatttataatctgattttcggaggaaatatatatgacaacaggtaaagagtatgtagctggtgtctttgataaagtcaaagcgcaaaatgctcacgaaccagagtttttacaagcagtagaagaagtatttgaatcacttgttccagtgtttgataaatatccaaaatacattgaagaaaatcttctcgaacgtttggttgaaccagaacgtatcgtttctttccgtgttccttgggttgatgacaaaggtcaagttcaagtcaaccgcggtttccgtgttcaattctcatctgctattggaccttacaaaggtggtcttcgtttccacccatcagtaaaccaatcaatcatcaaattccttggtttcgaacaaatctttaaaaactcattgactggtcaacctatcggtggtggtaaaggtggttcaaactttgatcctaaaggtaaatcagacaacgaaattatgcgtttctgccaaagctttatgacagagttgagcaaacacattggtgctgacactgacgttcctgctggtgatatcggtgttggtggacgtgaaatcggctacctttacggtcaatacaaacgcctccgcaatgaatacacaggtgttcttactggtaaagggcttacttacggtggttctcttgctcgtacagaagcaactggttacggtgctgtttactttgcagaacaaatgcttaaagctcgcggtgaagacttcgctggtaaagtagctcttgtatctggttcaggtaacgtagcgatttacgctactgaaaaacttcaatcacttggtgctaaagttgttgctgtttcagattcatctggttatgtttatgacccagaaggtattgatgtccctcttcttaaacaattgaaagaagttgaacgtgcacgtattgtcaaatacgctgacgctcgtccaagtgcaacatttacacctgctggtgaaggctcaatctggtcaatcaaagctgaccttgcattcccatgtgctacacaaaatgaaattaacgaggaagatgcgaaagctcttgtagctaacggtgttatcgctgttacagaaggtgcaaatatgccttctacacttgaagctatcgaagttttccaaaaagctggcgtttcatttggtcctgccaaagctgcgaatgctggtggtgtagcggtatcagctcttgaaatggctcaaaatagccaacgtacaccttggtcattcgaagaagtagatgctaaactttatgacatcatgaaaggtatctacgataattctgcagcagcagctaaagaatttggtgctgaaggtaaccttgttgtcggtgccaacgttgctggattccttaaagttgcagaagcaatgtcagcacaaggtatcgtttaaaatcttgtctttcacaagactgttgtataactcttaatgacttaatcaacaatcttttataatctttaattaaattctctaatatcaaataaccgaaaatgagtccacgaagtgtgggctcttttggttggtatcgttgcaactcattattagttattctcgattttgttggtgcaataaaatcttgagtcaaatgtgagaaagcgcatggtagcaaggttttatttattttgttataatgtttttagcgaaagcgagggcttgatatggttatagtgagaaatgctttggctagtgatgccgaggctattttggcattttgccagcagattggttcagaaacagataacttgtcttatggagaagaaggtttgactgtttctgttgcagatgaggaaattttattaagtgagattcaaaaatctaagacatcacatttcttagtagctgaagaggctggcgagatagtagggacgtgcaattgcagtgcttttcataaaaaacgattggcgcatcgtgcagaaatcggcattacggtgaaaaaagcctactggaaccaaggaattgggcgtcagctattaacgcgattgattgcagcagcgcagcaatcaggcttaaaagtcctctcgcttgaagttcggtctgataataaccgagcgattcatctctatgacagtcttggttttcaaaagattggaacgtttaagcactttatggaaattgatgaccaagctattgattttgatattatggaattactattggagaaaaaatgattaaacagattgtaagagacacctttttcttggcgcaaaagtcagaagaagcaacaaaagaagatttgtatttggcacaagacttgcaagatactttagtggcaaaccgtgataattgtgtcggcatggctgctaatatgattggcgttaaaaagcgagcaattattgttaatatgggggtagcagatttggtgatgttcaatccagttttgcttaacaaatcacttccatttgacacgaaagagtcttgtttatcattgacaggagcacgaccaacacgtcgttaccagaaaattgaagtgtcttttttagacaaaaattggaaccaacagaccttaaccttgacaggtttgtcagcacaaatttgtcaacacgaattagaccacttagaaggtattatcatttaattttcaaaaataatctcaaacaaacgttgatatatcaacgtttgtttttgctttcagaaaatagttgaaaaataaagcagaagcgaagcttttttcttgacaatagttctcataagaactataatgtgttctacaagaatgaatcttggtatttttcagaaagtgaggaaaagatgcacaagaaagatccgttttcacagtttagggattttatcaatttaatggaaaatcgtgtccacgctcttgcggaaagtcatggtgttgaaaatctagctggtccacaaggattagcggtgatgtatctccgtgataatcccgataaagaaatttatattaaggacattgaaaagagactaagaatttcaaagtcagtaactagtaatttgattaagcgcatggaaaaaaatggttttatccaagttattccgtcaaaagaagataagcgttataagcaagtggtgttgactgagcttggaaaatcaaaggctcaagacattcaagatttccatactgaagtacaaaagcaaatcttaactggtgttgaccacgaggatctcaaaatctcgtttcgcgtctttgaccgcattttgaaaaatttagaaaacaaggagtaacgcatgttaaaaattttgaaacgcttaacagcaaaagaagttacaatgcttatttttgctgtattatttgtgtgtttgaatgtttatcttgagttaaaaattccagattatatgtcagatatcacgaccttgctatcaacagaaggaacaaaagtaaaagatatttttgcttggaactttgatgcaccaggtatgcgtatggtcttgctttctttgggaagctttgcggcatctgtcgttgttggtttcctagctgctcgtattgcggcaagttttagtacacgcctacgtgatgatattttccatagtgtcttgaatttttcagatgctgaaatcaagaaattttcaattcctagtcttttgacacgtacaaccaatgatattacacaaattcaattggttttcacaatgggaatccaagtcattactaaaggacctatcatggcaatttgggcaataaccaagattgctgataaaaatcatgaatggttattggttcttatcgtcgcagttgcggttatgttcttgatgatcattttcttgttgatgatggtgatgcctaaacaacgcatgattcaaacattaaccgataaattgaacagtattacgcgagaatcattgacaggtatccgtgtggtgcgtgcatacaatgccgaagattatcaagatgccaaatttgcacaagccaatgataatgttaccaatcttaacctctttattggacgttcaatggcgttgttatctccagtaatgacaggaatttcaagcggaatgacacttgctatttactggattggtgcgcatttgattgaaaatattgctattccgacagacccaacgaaaattgctggtgctatgcaagataaagttgatttgttttcagatatggttgtttattcatcatatgccatgcaagttgttatgggattcatgatgatgattgtcgtattcttcattttacctcgtgccgttgttgctgctgggcgtattaatgaagttcttgaaacaaaatcttcaattgaatatccagaaacaaatcaagctaaaccaactgaaaaaggttctgttgaatttgacaatgtttcattccgttacagcaaaaattcagaagctgttttggaacacgtttcctttaaagcgaaagctggagacacggttgcctttattggttcaactggttctggtaaatcaactttggtgaacttgattccacgtttttatgacgcgacagaaggaacgattaaagtcgatggcattgatgttcgtcaatatgaccacgatacgcttcataagattgttggttatattccgcaaaaagcagtgcttttcagtggggatatcgcttcaaatatggatatgggagaaagcaatagctcgccgcttgatgatgacaagatgtgggaagctcttgatttagctcaaggtaagacattcgttgaaatgaaagacggtaagttaaaagcacctgttgctcaaggtggtcaaaacttctcaggtggtcaaaaacaacgtttggcaattgcgcgtgctcttgctcgtaagcctgaaattatcatctttgatgattcgttctcagcacttgactacaagactgaccgaatcctccgttcacagttgaaagaacgtacagctgatatgacaaaattaatcgtggcacaacgtatctcaacgattatggacgctgaccaaattttggtcttggatgaaggtaaagttgttggtcaaggtacgcacgaagaattgcttgcaaacaacgatgtttatcgtgaaattgcttactcacaactatctaaggaggaattagaaaatggaaaataagaaaaaaacatctttctatggcagaatgaagccctacattaaaggtttccagcttccatttcttcttgcagtgattggagcaattgtttctgcgacggttacggttattggacctgataaattaaaagaaatcaccaatacaatcaccaaaggtttgacaccaacggcgactggtatgattccaggaatcgacttggataaagttggtgaaattgcattaactttggcaattttatacgttatttcagcagtagttggttatattcaaagctttaccgtagcgactatcgttcaacgtttttcacaacgtttacgtaaagctattcagaccaaaattgacaaggttccattgaattactttgatagtcattcgcaaggggacaccctttctcgtgtgacaaatgacgttgacttgcttggtcaatcgcttaaccaaagtttgggaactttggtgacatcaaccatgttattgattggttcaattttcatgatgttccattcaaatgtcagcatggctttaacagcgattgggtctgttctgattggttttgttttggttatggttatcatgggctcatcacaaccattgttcaaacgccaacaaaataacttggctgcgattaacggttatgttgaagaaatttactctggtcataatgtggtaacaagttataacgctgctggtgaaacaagcgaaacctttaaaaaattaaacaccaatctttataaatcaatgtggcaatcacagttcttgtcaggtattatgatgccgcttatgattttcgttgggaactttgggtatgttatggtctgtgtggttggtgccgttaaagttatcaatggtgatattaccatgggtgacgtggttgcctttatgacttatgttcgtatcttctcacaaccattgtcacaaattgcgcaagctttcacacaaatgcaatcagcaacagctgccatgagtcgtgtctttgaattccttgaagaagatgaaatggaagacgagtctgacaaggaacgtcaacttagtgatgttaatggtgaagttgcctttgataatgttttctttggttattctaaggataaaacaattatccatgatttctcagctgtggcgaaacctggtcagaaagttgccattgttggaccaacaggtgctggtaaaacaaccattgttaacctgctcatgaaattttatgaaatcgataaaggtcaaatcactattgatggtgtggatacacgtttgatgacacgtgaagaagtgcatgaccaattctcaatggtgcttcaagatacgtggttgtttgaaggaacaatcaaagaaaacttgatttacaatcaagaaaatattacagacgaacaagttattgcagcggctaaggctgttggtgttcatcactttatcatgacacttccaaaaggttatgacacttatcttgatgattctgtaacgctttcaattggtcaaaaacaactcttgacgattgcgcgtgctcttttgaaagattcaccgctccttattttggacgaagcaacgtcatcagttgatacacgtactgaagaattgattcaaaaagccatggataaattgatggaaggtcgtacatcatttgttatcgctcaccgtttgtcaacgattagaaacgctgaccttatccttgtgatgaaagacggtaacatcatcgaacaaggcaatcacgatgatttgatgcaacaaggcggcttctatgctgacctctacaactcacaatttgaagtagcttaaaactaaaacgagtctgggacaaagtgctcagcctcgttttttgttgtttgcatattctagttaaaagattttagaaagttaggcaagtacctagctttttcttttgtttttattttgtaatagcatttatataacttgcaatcaatttttaaagcaaaagtggcatttgtttaggaattgaaaaatagtaaaaatatttgactatttttggtggttgtgacataataatggaaaatagtgagaatcaagagggaggaagaaagtgaaagctgttattgttagcaaagcaggagatagtagtgttttaaaggtgactcaggttgctaaaccgcaagtgaaatcaggttggtctttggtgaaaattatgggatttgggattaatcgttctgaaatttttaccagacaaggcttgtcgccgagtgtcacctttccaaggattcttgggatagaatgtgttggcgtcattgaagagacgacggacgagcaacgtttgccagttggtcaaaaaatcatttcgattatgggagaaatgggacgagattttgatggctcgtatgctgaatatgcacttttgccaaatgagcagatttatcctatctcaacgcagttggattgggcaacgttggcgacgattccagagacttattatactgcctttggtgcttatcaaaatttaaaaatcacttctcatgatacggttttggtgcgtgctggtgctagtggtgtcgggacggcttttgtgaaattggtaaaagctaaatttcctgacgtgaacgtctatgcaagtgtgcgcaatactgctaaaaaagcgcagcttttggacgctggatatgatgatttggttattgatgataatggtgtgctaaagacggatgtgacattcacgaaaatcttagaattagttggacctgccaccatcaaagacagtctagggcatttgcaagaaaacggaattatttgttcctgcggtcaattgggacgaaaatggtatctggaagaatttgatccaattatggaacttaaaaataatgtctatttgacaacgttttattcaggcaatgtttcacaagataagattcagaaaatgttagcttatattgagcaagaacaagtagatgttcgtcctgagcgtgtatttgatttggatagtatccaagctgcacatgattatcttgatagtgttgcggcatttggcaaggtcattgttttaaataaggaggaaaattttagtgataagtaatgctagaaaatacgctcgtttgcgtgatgagcaattttccctctatgaaagctacgctaaaaagcatgggctaaatagtaaatcgttattagtttttatgtggatttatcataatccacatgggatgacacaggagagcattgcaaaacgaacattttcaacgaaacaagtgattcaagcaattgttaaaacttatatgaaaaaaggaatattatatttggagccttcccgaattgacaggcgcaagaagttgattcgtttaactgaaacaggtcagcagtttgctgctgaattattggagccgttagcagattttgaagcgcaagcaatgagcgctttgactttggaagaacaggaagttttattgtcagcgacagcgatgttcactgataggttaaaagaacttttagaaagtcatcaggtaaaggaacatgttaaatgatatagctgcatattttgcagataatggaaatacttatttaggatacgtttggcaacacattagcctaagtttcgaggctttgttgattgctttaatcatcgctctaccacttggttatttttcttatgaaaagccgtttgtacgacaattgtcaacgcttttgacgcaagggctacgcgttattccaagccttggaatactatttattctgattccattcattggagtggggcgcttacctgcattgattgctttagtgattttgggaataccacccattttattaaatacgattgttgggtttgcgtcggtttcagaaaatttgctggaaacagctttgggacttgggatgacaaggtcgcaattattaacaaaagtccaatttccgttagctctgccacatattttaaatggcattaaattggcattggtggaaattattgctagtgcaaccttggcgacctatattggagcaggtggacttggtactttgatttttacaggattaggactttatcgttatgatttattgctaattggtggtggttcggttgcgatattgtcgttccttagtatgattatttttgatttaagcataaaaggggtagaacattatgaaaaataaaaaggtgatttcaggagcgttactggtagtcattttggtggcaattgttggtggaatttgggcgtggcgcaataatcaatcttctgaagcgcagcaatcgtcaaccactattcgtgtggggtcgaaagattttacggaaaatctagtcattgctgaaatttatgcgcttgcgcttgaggacaatggttataccgttgagcgtgtgtcaaatatttcaagttctttgattcataattcaattgtcaatgatgagattgacttatatccagaatatacaggaactggtttgctgtcagttttgggtgaggatatggaaacagacccagagaaagtttataagactgttaaaaaagagtatgaggaacaatttaacctgacttggcttgattacgcgtcagcaaatgatagccaaggtttggttattcgtacggaagtcgccaattcactcaacatcaagacgatttctgatttgcaagctcatgctagtgaattgcgctttgcttcacaaggggaatttgatgaacgtgaagatggtttaccaggacttgaaaagacttatggtacctttaactggcaatcttcaaaggtatatgacaatagtttgaaatacagtgttcttgaaaatgatgaggcggatgtgacgccagcttacacgaccgaaggtcagttggtcaatacggatgaattcaccttattggaagatgataaacaattctggccaccttataatttagcgcccgttgtgcgagataatattttggatgacaatccagatattaaaaccattttaaataatatttcggcaaaacttgatactgaaacagttacggaacttaatgctaaagtggatgttgacggtcaagaatatacagatgtcgcgaaagaatactacgatagcataaaaggttagaaagatagatttatgacagaaaagacaatgattcaatttgagcatgtgagcaaagtttatggtgataaaacggttgttaatgatattaacttaaccattgaaaatggcgaatttatcactattttgggaacatcaggttctggtaagacaaccatgctaaaaatgattaacaagctgattgaaccaacgtcagggacgattctctttgctgggcaagatattgagcagatggattccgttagccttcgtcgtcagattggttacgttgtccaacaaattggcttatttccacatatgacggttgctgaaaatattgcaactgttcccaagttattgggctgggataaggaacgcattgaaaatcgtgtgggagaacttttagatttggtgcaattgcctgcagcggattacggcgaacgttatccaagtgaattatccggtgggcagcagcagcggataggtgttgcgcgtgctttagctgctgaccctgatgtcatgttatttgatgaaccatttggtgccattgatgccattactcgtaatgatttacaagaggaattgcaagcgattcatcagaaattaaatcaaaagacatttgtttttatcactcacgatatttatgaggcatttaaactgggaacacgagtggttatcatggataatggtaccatttgccagtttgacacaccagaaaatattatcaaaaatccaggaaatgaatttgtccaaaaattgataacaaccgcgcaggaacaagaaaaactgtggagggctagctatgattgattattttaagacatcttctgataagttaatcacggcgctcattgaacatattgaattgacgagtttttccctactgtttgctctgctatttgctagtgtcatcacggtgattttgctgttttaccctaaagtaaggcaggcttctgtttacgtcctatcactactgtacgccattccgagttttgcgctgtttaccttgttgattcctgtgacaggtttggggacgcgaacagccataatagctttggtaatctatgcgcaatatacgttagttcgcacatttttagcaggattgacacaagttgatgacagtattgttgaagcggcgactggtatggggatgacaaggtggcaaatattatcaaaaattcagttgccattggcgcaatcctctatttttgcaggattacgtttggcagcaagttcaatgattgctatcgcaacaattgcctcaacgattaatgcaggcggtctaggtagtattttgtttgacggactccgcacaatgagtttgcctaaattgctttggggtattattttgactgttgccctaagcttattagtcaacctcatcttgtatcttgttgaagaattagtcaagaacgaaagcgtgagttaatgcgtcttgcaataataagaacacaaaccaggaagttgggcattttgctcaactttttagctcttaaaaatgccccttttagcttcttataaggaattttgttataatgaaactatcatctagttaggaaaagttatgacagatatgatttatggagaatatgctgattacctgcctttgattttggaggactttagtcagcgtattcgcaagaaaaatgatgaggttaaaaaagagactggttataagctgtttgaacattttatcgctcgcgttaagacacctgaaagtatgacagagaagtgtcaacgcaaaaatcttccagtaacaaccgagtctgctttgaaaaaagtgcgtgatagtattggtctgcggatagtatgtggttttgttgatgatatttataccttagtggaccttatccgttcttttgatgattgcaccattgttgctgagaaagattacatcaaaaatgcgaaaccaaatggctatcgttcttaccatttgatagtagaagttgtgacgccttatcctgattgtttgggaaataagcagggctcatactttattgaaatacagcttcgcaccattgctatggattcttgggctagtttggaacatcaaatgaagtataagcatgatattaaagacccgaaacggattgtccgtgagctcaaacgctgcgcagatgaattagcgtcttgtgatttgaccatgcaaaccattcgaaacctcatccaagaaagctcccaagattaatgaatatgagctacgataggagatagcatatgaaaatattagttgcagaagatgaaattcaaatgaatcgtgtgttgactacggcgttaacccatgaaggttatgatgtggattcggtttatgatggacaggcagctattgatatggcaaatgaaaatgcctatgacgttatggttatggatattatgatgcctgtcaaatctggcatcgaagctgtgcaagaaattcgtcaaacaggcaaccagtcacacattattatgttgactgccatggctgaagttgatgaccgtgtgacaggcttagatgctggagcagatgattatttgaccaaacccttttcattaaaagaactattagcgcgtttgcggtcaatgtcacgtcgtgtggataccaatttcacgtctaatattttgaccgttggaacagttaccttgaatgttggtgaacaggaacttgtcagtcaaaacaccattcgcctagcaggtaaagaatctaaaatgctggaattcttcatgctcaatgcaggcaagaaattatcaaccgaccaaatttttaaccatgtttgggcaaatgacaaagatgacccagaaattgataatggctatgtttttatctacgtttcctaccttcgtcaaaaattgaaatcaatcggcgcaaatgtagtgattgagggtgaggaaatgggtgattatgagttgaaagaattgtaggtgatgccatgtttcgaaaattaagaattcgttttattgcgattgcctctttagccattctgattgtcttgttttcagtggttggggtgcttaattctgcccgtcatattcaaacggtaaatgaaatcaacaagattttaactttgatttcagataatggcggaacgtttccaagtgtttccaaggcaactagtgaattaggcaacacggtttctgtcgatacgctctttcaatatcggtattttagtgctgttattgatgaagatggaaatatcacttcgttaaattcgagcaatatttctgatttgaccgatgagcaagtggagaattacctgactaagattaataaatcaggtgatacgagcggtgattttcgatacaataatcacacctattcttatcttgtaacggatgaatcagatgattcgacattgattgttgtcttagactcaacaaatcaagttgaagaaaatatgacactggttcatctttctttatggatgtcaggggttagttttgccttctttgttctcatggtttctattttttctggtagggttattgagccttttatccgaaattatgagcgacaacgtcgttttatcacgaatgctgggcatgaattaaagacacctttggcaattatttcggctaataatgaattggttgagatgatgaacggtgaatcagaatggacaagaagtaccaacgaccaagttgaacgtatgactggcttgattaatagtttggtggctatggcccgtctagaggaacaacctgaagtcgtgttgaccgatttgaatttttcagcaattgctgaagatgctgccgaggactttaaaggtcctgttatcaaagacggcaagcaatttgtcatggaaattcaacctgatattcatgtcaaagcagaagaaaaatcactttttgaattagtgacccttttggttgataatgccaacaaatattgtgatgcaggaggaacggtttcagttaaattaagcaaagctaatcgcctctcaaaagcacgtttggaaatttccaatacctacgccgaaggcaagaacgttgattatagcaaattctttgaacgtttttaccgtgaagatgaatcacataataacaaaaaatcaggttatggtatcggattgtcaatggcacagaccatggtcaaactcttcaaaggaagcattagcgtttcttatagcggagataccattacatttttagtaagtttgtagggtgaaaactctaaagctgatttgcaagtaaagtaagcaacactctaatagcttactttctcctgttcaaaactcgttaacatcaacaaaagacgatttccgtttggaagtcgtcttgttttacttattgtatataaactcgttttctgacttacaagcccaataagcgtttgacgtgttctgggctttcgtttggtccgtagttatttggaaaacggtcgagtgactggatttgcttaatgtcatctggtgtgagttcaaaatcaaaaatatcaaaattttctttcatgcgttctaagtgaacggattttggaatggtaaggatatcgttttgaacttgccaacgtagaatgacttgtgccacagtcttgccatgtttttcagctatgctattgagcgtagcgtccttaaaaatattatcttctccacggttgaaagggctccaagcttgggtagctatgccaaattgggcattggcagcttgaatgatagggtgttgtttgtaggggtgaagctcaatctggttgagtgctggcacaacttcggtattgagcgcaaaatctgttaaacgtccagtagagaagttagaaacaccaatagcacggatatatccttccttataaagctcaatcatcgcacgccaagcgccatgagtgtcaccatatggttgatgaatgagataaaggtcaaggtaatcagtatccagtttgcgtagcgtttcctcaaaagcctttttcgtttcggtataaccaaggtggtcaatccagactttactagtcagaaagacatcttcacgtgaaagaccagaagccttcaccgcacgcccgacagcttcttcatttttataaatagcggcagtatcaattaaacggtagcccacttcaagggcgttttcgactgattcttggcattgtgcttggtcgaaaatttgccaaacaccaaagcctaaaacagggatttggataccattatttaacgttttaaaattcataatgtttcctccttagcctcattttagcacaaaagaaagcaaaataacggtatgaagattgctttatcagtttgcttcaggaaattcattgaggcttttcttgatttcttggataaaggctgttccaatttttgaaacttttttctttttattggtcacatatccaagggtatgtttaggactatcttgcagaggaatgaggacaatttggtcacgaacgaagctatttacaatgccaagaccagaggcgtaggcgtctgttgcacaaagtaaattcatgactgttccacggtcattgctataaagcacgtgctgttcatcgtgaatttgcaaggcatcctcgtcaaaattcaaacctgattgttcctgacggaagcgaatttggtcgtaaccttttaagtcgctttcagaaatgacatccttatgtgccaatgggtgattacgtctaagaaagacacgtgttggaaaatcacctaaagacgtaaactccaagtcttggtgttccaaggaagattccaaaatatgcttattttcgtcatccagataaataatacccaaatcagcttcaaaacgagcaacactttctaagattttcttagtggtcgtttcaatcgtttgaaattcttgataatcttgattgaattgttgggcaacctttgccaacggaattgacaagaaatcataatgatgcgatgctaccgtgaaactctttttaaattggtcatggtaacgctgctcaagcaaatcaagctcaccgataatacgtttggcgtatttcaaaaaatcatagccatcttcagttaagcgcgtgcctgtattggaacgtgtgaacagttgaacccctaattcattttctaaatccttaatagaacttgataaattgggttgagtcataaataattccttagctgcctgactaaaagaacctacacgagcgactgcttcaacataacgacattgttgaaaattcataaaacctcatcccttcttcataatagttgttgtcattatagcaaaaataagattaaaaaatcagtaaatttctgatagaaaaaaataaagccgtgataagatttttttataacccgtcattagttttctagattataagcagattttatggataataataaaaaatttagattatacgaatgaaaagagacgtggtaagataggattactaaaaatcttgaaggaagacgtgtctatgatagtaaccgaaaagcagttaagaaacatttcaatagtaacactaatcatttttgtcttatctcttcttatttttttgaaaatatctccttttaaccaattgatttctgattaccagagctctgaaatcacgaaagaagatttacagtatcttaattgcttaaaaagtttgacacatttgccttgaagataaaaagtcagtcgagagaatatcttgactggctttttctttggttttcgctataagcaaatcttatggctattcataaaaaatatagatttttcaagtataaaaatgcatgatagtataattgtcataccaaaagcaaaggagaaacagattatgacaacaaagagagaatgggttttaaaagcatttaaaaatgaaaaagtcgacaaagttcctgtcggattttggtatcatttcacaacggatgatgaaagaggcgacggttttaatcctgagattttcaataaaaatatcgcaggacataagaaattcgtttcagacgtcaatccagattttgtcaaggtgatgagtgacggcttcttcacttatcctaatgaacaaattcatcaaggtgtcacttctatcaaagaattagaaggaattgtctctatcggtgaaaatcatccttggattacacaacaagttgaattagccaaaaaaatacgtgaagatttcccagaagatattgcttctttctataatatttttgctcctgtgacttatttgaagtggcaattggcaggaaaaggtggcaatggtgatgaaatcattgaaaactttatcaaggaagatgctgagttgactaaagaagttttggacgtggttgctggcgacattggcatcttaacaaaacgtttaattaaagaagcaggagttgacggtatttacctcagcgttcaaaatttgcaagattcacgttcaagcaaagaagaatacaaccaagtgattaaaccaggtgagcttcacattttgaatcgtgcgatttctgctggtggtacgaatattcttcacatctgtggttatgaaggcgcaacaaatgacattacgtattacacagactatcctgcagatgttattaactgggcagttgaattggaaggtgtcagcttatcagaaggacgtcaattgttcggtggcaaaacagttcttggtggctttgaaaatactgaaaaaggtttattgtaccttggcagtaaagaagctattcaaggaaaagtcaaagaattgcttgatgaagcaggacgtcaaggcgttgtgattggagcagattgtaccgtaccaagtgatatttcgtcagaacgtattgattgggtgaaagaagcggctgctttataagtttttaggaaaaggagtggatttatatgagtaagaaaaaatggattgttgctggtggagttgttgtagcgcttgttgcagcgacagtaattggacgtcaattaacaggtaagacgaccgcaagtgctcaaagctcatctggcgattcagacaaggtgactacccttcaagtcgctcatacacaaaactatgtgccatacgattacgtcgatgaaaatggtgaaagtgacggatttgaagttgctgttttgaaagccgttgataaaaaattgaaaaattataaattcgaatacacaggaacaagtgacgaagatttgctgattggtcttgaatctggaaaatacgatattggtgtcaaaggtgcatggtacaccgctgaacgtgctgaaaaatttgtgattccagacgaagccattggtgctagtgtgattggctttgccattcgtaaagaagatgaatcaaaatacacagatatcgattcatttgctaatagcggtggtaaactcgttccaatttcaccacaaaatgctcaatacaatgtgattcaagagtacaataaaacagctaaaaatccgattgaattgacagaatcagaaagtttctctgttgcggatgcctatgcttgggttcttgaaggacgttacgatgcttatttctcaatcaagttgtcatttgaagaagctgttcaagacgaagatggtgcttatcatcaatatgctgaccaattaacatggttcccatataaaggcattgaaacttatccattgattcataaaaatgctactaatgaagcctttgccgaagaatatgataaagctattaaagagttgaaagaagacggcacaatcgcaaaactttctgaaaaatactttggagaagatgtctttagttacgtcacagactaggaggtgcctatggtttcttatgaaccgtctcgtgtgataacatttcttccggaaattttatcagctttacctctgactttatgggttttagtattgaccattttatttggaagcctgttaggactgtttttggcttggtcacagttgtcaggtgaaaaaagcttatcctcttttgcaagaggatatgtctttattttaagatgtacgccacctattgtgcttatctttttggttttttatggtttacctcgttttttagaatggtggttaggcatcgatgtcaatggttggtctcgttcagtgtttgttattttagcgatgacattgttgtttgcagctagtatctcagaagtttttaaatcctcttatcaagcacttcctaaaggtcaattagaagcagggcttagtattggtttaacagattatcagacatttgtcagaatccttttgccacaggcgtttcggattgcactccccaatattacgacagcgattattaatctattaaaagacattgctttagcctatacgattggtctggttgatttaatgggtgctggaaatttggttatttcacgaaatctgggcaattattcgcttgaaacctatacagcggttgccattatttactgggttttagcgttaattttagctgttggaacacatttcattgaaaatgagttagacacgacacgaggttaaggagggattatggatttttcttacattttagaaacatttgtcaaaactctttctgggattccagtaaccttgggaattatggttgtttccattcttttgagtttctttccagctctttttctagctttaggtcgcatttataaggtgaaaggtgttacgggattttcagttatttatctcgcctttattcgttcgacaccagctattttactgattttatttttttatagtctttttccaagtttgattaaccagctattgaaagccacaggttttaatatttttgacattaatcctatttattacgcttacattatttttgggcttatgactactggaagcttatctgagattatccgctctgccattttaacggttgataaagggcagttagaagctgcacaggcaattggactttcgactagtcaagcttatattagaatagtttttccgcaagctattcgtcaggcgctaccaaatctttgcaacttggtgattaatctcgtcaaggggacttctcttgtttttgtgatgacggtgaaagatatcacggcaattgctaagattgaagccgcttatggttaccattattttgaatcctattttgttattttcattatttatattgtgatttgtgggcttattcaatacggttttaaatttttagaaaaacgtgctcaaattgtttgaggtcaagttaggagttttctatgttatcagttaaaaatatcgaaaaatcatttggagataaaaaagttttagacgggattagtttgacagtcaatcaaggtgatgttgttgtcatcttgggaccttctggttcaggaaaaacaactttcttgcggtctcttaattatcttgaaaaagctgacgctggggagttgatactagatggcaagacctacgatttggcaaaaatcagtcgcaaggatgtccttgaaattcgcaaaaaaacagcctttgttttccaaaattataatttatttgctaacaaaacggctattgaaaatattttggaaggattagtcattgctcgcaagattccaaaagaagaagctatcccaattgctgaaaatgcgctgaaaaaagttgggcttttagagaaaaaagactactatcctagtcaattgtctggtgggcaacagcaacgaattggaattgcacgtgctatcgctgtgaaacctgatgtcattttatttgacgagccgacatctgcccttgacccagaattgattggagatgttcttgatgtcatgaaagaattagcccaggaaggggtcactatgatagtcgtcactcacgaaatgagctttgcgcgtgatgtggcaacacatgtcatctttatggaaggcggacacattatcgaagaaggcgacccaaaagaattcttcagcaaaccaaaagaagaacgcaccaaacaattcttaacccgcatcatcccagaactcaatatagacccagtgatttaaaaagcatcggtatggcaacgtaccgatgctttttgtgatagatgaatataaaagaaatctatggcggtctataaaaaagatagattatgcagacttatgaggtggtggtaagatagttgtacttaataaaacctttagggggaatgagaatgaagaaaaaagtaaaatggattatttctattattgtagtagcgttagtagggctattgatttttgataaagtaactaaaaatactagtgaagccaagtccgattctagtgaaaaaatcaccgttgttgcggcaacaagcggctcgccaaaaccgtttacttatgaggaagacggtgaactaactggacaaaatattgaattaatcaaagctgtttttgaaaaattgcctcagtataaattaaaaatcgtcaaggttgaattttcatctattttttctgggctaacttcaggacgctatcaaattgcagtgaataatttagccaaaaacgccgaacgtgaaaaaaagtatctttttacagatccaatttttaaaaattcttacgtcgttatttttaaaaacggtagcgataaagccaaaacagccgatgaatggtcagatttagctggtttatcaacggttgggtcatcaggtgtaaattcaacaacagcaatcgaagaatataataaagcaaatccagacaatacgattgagctcaattattcttctgaggatttaaaatcacaacttgaaggcgttgaaagtggtaaatatgattttctcgttatggataaaccaatgtttgaatactatcaaaaagagtatagcttggatttaacggggaaaacgattagtggagacttgtcaacagctttaatgtctgaaccatatagttattttgttgttggaaaagaagaaacgcaactagcagaggatattaatgctgctcttaaagaagtcgttgaggacggaacttctaaacaaattaacgaaaagtattttgatgaagattattcaccaacttatgatgattaggagattgttatgacttttaaatatacgattgaaacagattcggataaggtggattttcaacaagttgctgatgttttgcattcagcagggcttgctagcaatacagatgtcaaacaaactgaaaagtcttttcgtaacagcgacatcactatttatatcaaagatggaaataaagtgattggggttggacgtgctttgacagattttgtttcgcaaggagcgatttataacgttgcagttgctgcagattatcaaggacaacacgttgggcataccattatcacaaccttattagacaaactagcaggaattaatgtgattctttatacacatccacaaacgctcactttatatgaaaaatatggtttccgtcgcaataaaacagcttttgctcactttgatcatggaacacctgagagtttacaatggatggaagatgaagggttctttttaccagaaaattatcgctttgatagtgagaaaggacggtattagtatgaaaaaattgttaaaatctctttttatttatgaagatgacccgcgttcaatgatatatcgtttaacaagcttacaagcaaatggttatttagaagatatttcacttttattcttagaagaaatcgaaagtggggaaagactatgacaactaaatttgttagcaaagaagtagatgattcaggacattttaaacgccagaaaaccagatttacaactccttttggaagagaagaaggtcagttacctgttgagaagaatcgttatagattgattgtttcatatgcttgcccttgggcacataggcaattaattgctcttaaactgttggggttagaaaatgttattagcgtaggcgttgtcaatcctattcgtcctgtgggggttaatcggacagattgggagtttagtttggatgaaaataatactgaccctgtccttggtgttcgttatttaagtgaattgtatttaaaaactgattctgcttatcagggacgttttactgtcccagcagtagtagatttgcaaacagaagaagttgttaataatgacttttataatttgctgaaaatttgggagatggattggacaccatttcatagtacagaagctcctgacctttatccagaagaattgcgtgctgatattgatgctttaaatgagattatttttcatgacattaacaacggtgtttacaaagcaggctttgctacgagtcaaaaagcttatgaagaagcttatgataaattatttcaacggttggatgaattggaagaaagattagcacatagtcgatatttattcggtgagcgattaacggactctgatattcgactttacgtgtctctcgtgcgttttgacattgcctactataatggttttcgctgtaatcgcaatcgtttaattgattttcctaatctttggggttatgcgcgtgacctttatcagcaagaggcttttaaagaaactaccaattttgaccatatcaagaaacattatcatataagcgctgttgataatcctcatcaaattttaccaaaaggtcccgatttgagtatttgggatttaccacatgaccgtgctagtcgtcactatatttaattaaaggagaaatactatgccaaactatacaaatcctaatgtcaagccagtagaaataaaaattcgtcctgttgaaacgaaaacagaaattgatgaacgtggtgcttttcaacgccaaccaaatcattttacaacaccatttggagatggtgagggcgaattaaaagcagaaaaagggcgttatcatttatattgggcaaaaggatgccattggtcaaatcgtgcttctattgttcgagaattactaggtttagaagatgctatttctgttactattgttggacatgattacgaagatccagaaaaacgccgatatggatgggattttgctgcttacgaaaaccaagttgacccaacaacaggagccgaattcttatctgaattttattatcgtgccgatccagactatactggtcgtacaactgtaccagctcttgtagatttagaaacttatacagttgttaataatgattatcatcgattgactaattatttagaagttaactttaaaccattccaaaaagtaaatgcgcctaatctttacccagaagaattgcgtgctgatattgataatttgaatgataatgttctttttccatttgttaacaatggcgtttatcgaatgatgtttgcacaatccttagttgcttacgaggaagcattcgatgattttttcacaactttagatgtgcttgaaaaacgattggagaataatagatttttatttggtgattatgttacagatagcgatgtgcgcttttttgtcaccttagcacgctttgatacacattactaccgaaatttaggtccaatcaaaaaacgaatttccgagtacactaatatttggggctatgcgcgtgatttgtatgaaattccagcctttaaacacaatacttattttcatgatatagcgcgtggttgggataccaagaaagaaaaattatttgtcgatttcaactcacggttcgctgatgatactgatttcgatgctatttggtcaacaccacaaaaacgcaaatacctttcaaaaacaccagaacaaaaatttttgattgattgagtttgcgtacatagttgattgaaattaagaattcagttcataattacagtgttaaaagtggctaataaattgtacattgaaatgatataagttggctaataggaagtctgttttatagcttcatcgctttcttcacctctaaccattattactgacataaacaagcgaagttgagtgcacttttccagcttcgtttgtttttttatagtggcatttattttccagtaaaagtcgctttttttgtggaacaatgataaaatggagtgtaaactaaaaattgtaagagaagaacatgactaagaaaattggcgtcggtaaggcgcatagtaagattatttggatgggtgaacattccgttgtttatggctatcctgccattgcgattccgcttcaaggaattgaggttgaatgtcatatttatccagctgaagaaaagattcactttgatttttatgacacgttatcaactgccgtttatgcggcgttagagtacctaaatcacacagatgtttccattacctatgcgattcgttctgaaattccacaaaaacgtggcatggggtcatcagcagcggtttctatcgcagctatccgtgctgtttttgattattttgagcaaagcattgatatggatactctggaaattttggtgaataaagcagagattattgcacattcaaatccaagtgggcttgatgccaagacttgtttgagtgataaagccattacttttatccgtaacatcggttttagtacccttgatttagatttggatgcttatttggttattgcagatacgggaatttatggtaatacgcgtgaagctgttgagaaggttgcccaggcagaagaggcgaatttaccacatctggcagccctcggcgatttaaccgaaattgttcaaaaagctattcaagacaaagatattcaaaaaattggtcacatgatgaccaaagcacacgctcatttacaagctattggtgtcagcattgacgttgccgaccaactggttaagctttctttggaaaatggtgcccttggagccaagatgagtggtggcggacttggaggctgtattattgcccttgcaagtaccaaagccgacgcagaaaaaataagtaacgcattaaaagaaggaggagcggttcaaacgtggatcgaaaaattgtaacggtaaaatcatatgccaacattgctattatcaaatactgggggaaagctgacgctgtcaagatgattccagcaactagcagtatttctttgacactggaaaatatgtttaccacaacaactgtttcttttttaccacaatcggttggtcatgatgaattttacatcaatggtgtcttgcaagatgaaaaagaacacgcaaaaatttctgccattatcgaccaataccgtggtggacgttccgaatttgtcagagttgaaactagcaataacatgccaaccgctgcaggtttatcatcaagttcaagtggactttcagcacttgtaaaggcttgtaatgaacttttcgaaactggcttaaatcaatcagagttggcacaaaaagccaaatttgcttcagggtcatcatcgcgttcattctttggaccgattgctgcgtgggataaagacagcggagacatttatccagtgcaaactgatctcaaattagcaatgattatgcttgttttaagcgatagcaagaaaccaatttctagtcgtgaaggcatgaaacgctgtgctgaaacgtcaacaacttttgtggattgggtcaaacaatctgagcaagattatcaggatatgcttgcttatttgaaagccaatgattttgagaaagttggagaattgacagaacgcaatgcgcttgccatgcacgatactaacacacacgctaatccaccattcaattatttgacagatgagacctatgcagctatggattttgttaaatcgctgcgcgctcaaggtgaaaaatgttatttcacaatggatgcaggcccaaatgttaaagttctttgtttggaagaagatttagagcgcttaacaaaacgttttgaagaaaactatcgtgtgattgcatcacgtactaaggtattaccagatgaaaacgattagtgtgcagacaggtggaaagctctatattgcaggcgagtatgccatactaacccctgggcaaactgctattttgaaaaatattcccattcatatgacagcgacagtcaaagaagccgaaaaaattacccttttttcagacatgtttgactacgctactgatatgacagtggataagaattatgcgctcattcagcaaaccattgtaactctggctacttaccttgacaaatctttacttgatttgccagcgtttaaactcgatattactggaaagttagagcgtgacggtaagaaatttggcattgggtcaagtggttcagtgacggtgttaacgctcaaagccttgtccgcattctatgagctaaatttatcagcggataccatttttaagcttgcttcctatacgcttttaaaattgggggacaatggttctatgggtgacatagcttgtattgcttacgatgatttggtggctttcacctcttttgaccgtcaaaaagtgtcaacgtggattgcaacagaaaacatcaaaactgtacttgctaaagactggggctatcatatcgaaatcatcaaacctgcgttggcatgtgacttcttggtaggctggacaaaacaaccgtccatttcaaaagatatgattaatttagtcaaatcagccattacaaaagcgtttcttgaggatacagaaagaaatgttcaaatctgtaagcaagcccttcaaacgggtgataagatggctgttaaggcaagcctgcaaaaagttagtgatttgttgctcggtttaagttcagctatttacaacgacaaattaaaggcgttgaaatctgctgaaaaaggtttagatgtcattgcaaaatcatctggctcaggcggcggcgactgtggtattgcaatatcattctcagaaagcgacagccacgaactcgcccaacgttggcagaaagctggtattgaaatactatatcaagaaagattaagtgatgaaagataaattaagtttagtcagaccaatttggattgaggtaaccaagaatgattaatcgcaaagatgaacacattaagtatgctttaaaatatcaatctccttataattcttttgacgatatggagttgattcatcattcttttcctgattatgatttaagtgagattgatttgcatacccattttgcggggcgtgattttgagtttcctttttatatcaatgccatgacgggcggttcagaaaaaggcagagctgttaatcaaaaattggctcaaattgcacaagcaacggggcttgtcatggttacaggctcttatagtgctgcgctgaaaaatccacatgatgattcttatcctagcaaagaagaatttccagagttgctgctagcgaccaatatcggaattgataaaccttatgaattagggctacaaaccattcacgaaatgcaacctatttttctccaagttcatgtcaacctaatgcaagagcttttaatgccagaaggtgaacgtgagttccgccaatggaaagaaaatctcgccgattatgccacaaagatgccagttcctgtcattcttaaagaagtcggctttggcatggatttgaaaacaattgaaatggctcacaagttaggcattaaaactgtcgatatttcaggacgtggtggcacaagttttgcctatattgaaaatcaacgtgggcataatcgttcttatctcgatgagtggggacaaagcacggttcaaacgctgttgaatgctcagccgatgattgataagattgaaatcttggcatctggcggcgttcgtcatcctttggatattgtaaaatgcttggttttaggagcaaaagcggtaggattatcgcgagcaatcctaaaactagtcgaaaaatattccgttgaagaagtcatcacaatcattaatggctggaaagacgacttgcgtctcatcatgtgtgctctgaattgcaaaacaattgccgaacttagacaggtagattatctcctatacggaaaattaaacgaagcaaaccaaaaacgctgattcttttgaatcagcgttttttattttttatatattactaaatttatcacaacatgtaataaacaatggcaatgtaatgtagcactgaagctagtaaaatgaagaggtgccaaatcatgtggtcgtaaggacgttttctagcgtagaagattgctccgatagtatatgaaagaccaccagcaagcattagtagccagaaagcaacaccagttttactaacaatgcttggaataatgaaaatcactagccagcccataagtaagtagagaaagagtgagaatttttcattaatcttcttggcaaaaattttatataaaataccaaaaatagttgcgccccattgcaagataataataacatatccgagccagccacctactaaagagagagcgacaggagtgtaagaccctgcaatagcaatgtaaatcatactatggtcgataatccgcaaaatgaatttctgtggtgaatcatattgcatagaatgataaattgtcgatgatagaaacatcaagaaaaggctaatatcaaagatagacatgccgacagctgcttctataccataatgttgataactataaatggcagtgataggaagcaggacaagcattgccacagctccaacagcgtgagtgacactatttgcgacttcttcgccgaatgaaagacgtttacttaatttcatagtcatgctagcattcatctttttctccttctaattcttgaactaattggtgagtttggtaatacagctgcaatgtttgacaagctgaaacgacaacaggaggcaagtcgtctatcttttcaccattcatgcaagcaacaaaatcatcataacgtttttgtgattggttgtccgctgttaaaatcgccaatgtttggctaatttcttgaatggaaaagacgttttttaaacttgtaatgacaattaatcgtgccacctgcttacgactgtattttttcttaatcggcttttcgagatgcccatgtttaacataattgttaatcatagaagccgttaatcctttttcgttttgatgattggcttcgccgatttggttgacatacagcagtacctgatctaaatataaatctatatctggtaattcagaccattttggataagacattgtcataaagttttatttacctctttatctagtatcgataactagattatataatctctaaaaaatattgtcaagcaaaaaccttcattttgaagaaataatgtcaaaaaaatcagaaaacttaatcttttcgcgtatttacagttataaaaaaagcgtctgggaggttccagacgctttgtctatttcagattttttagaattgttttggcagtttctaaattcatatgtggtgcttgcaagagttgttgaaccactttgccaacttcgttttcagtggcaccagcaagaagtgctaatgatttggcttgcaatttcatgtgtcctgcctgaataccagtagaagtcaatgctttcacggcagcgaaattttgtgctagcccaacagaaacaatgatttttgcaagtgtttgtgcatctggatgccctagtagttcgtgagcgattttaacggttgggttaagtccgatagaaccaccgcgtgttgcgattggcattgggagcgttaattgaccgcgaagcacttgttgttctttatcaaatgaccaagttgctaaaccacggtattgtccgtctttgcaagcataggcgttagcgcctgcttcgatagctcgccagtcatttccagttgccaagacaacggcatctataccattaaaaatccctttattatgcgtggtagcacgataaacatcaatttgagcaagtttgcttgccagttcaaattttcgagccaactcatgagcttcctctttgttgcggctgaggtagcgaaggtcaacttgacattcggcggtaaccagcgcctgcgttgcatagtttgaaagaattgccattagactttttccgccagaaagttcttccaagctaggcactaaagcctccatcatggtgttgaccatattggctcccatagcttcttgtgtatcaaccgtcaagtaaacaatcagaaactcatctttttctttcacagtcaattctctagcgccgccaccacgttttacgatagaagggtgagcttcattggctaaagtcaatagctgcgcagaatgattcaagatagtttcttttgcgatagctttgtctaccacatcataaagggcgacttgaccaatcatttttcgagaatgaactttggtcttaaaaccacctgaacgtttgatgattttagctgcaaaactagccgccgccaccactgaaggttcttcagttaccattggaacgttgaaagtagcaccatcaacctgaaaatcatgagcaaccgaaaacggcaaagagaaagttcccaaaacattctctgttagctgattggctgtttcaagcgatagcaaggtattttcttttaagtcattaagtgttttagtgtttaaaagatgattattttccaaatgttcaagacgttcagttattgtttttttggagaatccactccagttaactttagtcgatttcgtttgtttttccataaattctttcgtgtccacgaatttctttgagggcaaatgttccagttttgtaatttgtaaaagaagcattgccgtcagcatctaaaacaggttcttcaaagaagattctttcgtaatcttcaacagaaagagcaatacgttgtttgagttcttgaagtcggctatttttaagcttgtctttgaaaccttcaaccaatgttccagtgaaaatttcagcaactgcgccacttccatagctgaagaaagcgatatcgtcaccacctaccaagttttcactattttcaagaagtgaaaggagtccaaggaagagtgaaccagtgtacatatttccgacttgtttactataaaggatagagctttcaaaattagctttaagtttttcttgcaaatcagctggcaatgttttatccataattttattaaagcctttaagggctaattttggaaatggtaagtggaaacagaaagctgaaaaatcagaaagtgatgtattaaagcgtttttgaaattctgcccatgtcgttttcaacatatcaaggtattgtttggttgaataaataccattgacataaggcgttgttgaataattaggacgccagaagtccataatgtcgcgtgtttgagcaacagaattatcatttaagagcaaaatttgtgggtcttgtgagataagcatggcaatgctaccagcaccttgcgttggttccccagaagtgtgggctccgtaacgagcaatgtcagaagcaataacgaggacttttgattctgggtgtttttcaacgtgtaagcgagcgtaatcaagcgctgctgtcgcactgtaacaagcttctttcatctcgatactacgtgcaaaaggttgaattcccaaaaggctgtgaatacaagttgctgccgctttactttggtcaacagatgattctgtcgcaacgataaccatatcaatggcttctttgtcatcatcagtaagaatgctgtcagcagcagaagcaccaagagttacaatgtcatcattgacaggtgcaatactaagcgttcttaacagcaaacctttgctgtatttttcagggtcaacttgacgactttcagctaaatcatccatgtttagcatatattgtgatgtcgcaaacccgattttatcaataccgattttcatgaataaacctttctgaatgattgaactcacctgatactacaatgtttacgagtacctgcctagctaactcataattagctcaaatgtcttatggcatagtgagttcgtgattattattaattgagtgactaaatgtccattcataattctaccataaagttgtgaaaatgctctacaaaaaaattatttatttcattcgtcaaagtaatgggcaaaatattttgaatacaagaaaaatactagctttttttgtttatttcagataaaataggaaggaatgatttttttaacaaaatcaaaaaatccaaaggagtgaatggcatgacaaaagctgatgtgatttttaaagaaaatatcaaaaaaattatggaagaaggtgtcttttcagaaaatgctcgccctgtttaccaaagcggtggacaagctaattcaaaatacgttacaggagcgtttgctgaatatgatttgagtaagggggaatttccgattacaaccctccgccctattccaattaaaagtgctattcgcgaaatcttttggatttatcaagaccaaacgaatgatttatcagttttaaatgataaatacaatgtcaaatattggaatgactgggaagttgacaactctggaacgattggtgaacgttatggtgctgttgtcaaaaaacacgacattatccgtaaaatattgaaacaattagaggaaaatccatggaatcgtcgcaatgtcatctcactttgggattacgaagcttttgaaaatacagacggacttttgccatgtgcttttcaaacaatgtatgatgtgcgtcgtgttgacggtgagatttaccttgatgcaactttgactcaacgttcaaatgatatgcttgtttcacaccacatcaatgctatgcaatatgttgcccttcaaatgatgattgctaagcattttggttggaaagtgggaaaattcttctactttgtcaataacttgcatatctacgataatcaattcgagcaagctcgagaattgctttctcgcgaatctacggattgtaaaccacgtttggtactcaacgtgccagacggaacagatttctttgatattaaaccagaagattttgaattagttgattatgagccagttaaaccacaattaaaatttgatttggctatttaatccctcttttgtggtcgtttccgtatcacatttctgcattttttagggaaatctgataaaatgaaatagacgaaatgagaggactgtatgacaaagaaaatcgttgccatttgggcagaagatgaaaatcgtttaatcggagtaaatgatggcttgccatggcgtttaccaaaagaattaaaacactttaaagaaacaaccatgggacaagcccttttaatggggcgtgtcacctttgacggaatgaatcgccgtattcttccaggacgcgaaacattgattttaacaagagacaagtcctttgaggcagaaggtgtaacaatcgttcatgacatggacgaggtttttgaatggtttgaaaagcacgataagaccctttatatcgttggtggagctagtatctataaagcttttctaccgcattgtgatgctattattaaaacaacagttcatggtgtttttgaaggtgatacgtatttcccagacgttgatttgacagactttaaaaaagtctctgaaaccttcaacgaaaaagatgataaaaatgcctacgactttaccattacagtcttagaaaaataaaaatagggagataggaatgcaaagaagtatttttggtgtattcacggctttcttagcggttatttgtattttatgtgccctcccagcacttagaaaaaaacgatatggattggcagttcttttgtttttaaatgcctttacaaatatagtcaataccattcatgccgtgtatggtaccttattttaatttagagagaatagaattagagagaataaaagatggttggaaatcgaacaaatgatgtaaaagtttattgctcattctgtggaaaaagccaagatgaagtgaaaaaaatcattgcaggaaacaatgtttttatctgtaatgagtgcgtggctttgtcacaagaaattatcaaagaagaacttgctgaagaagttcttgcagatttagcggaagttccaaaacctaaagagttgttagcaactcttgacgaatatgtcgttggtcaagaccgtgccaaacgcgcgcttgccgtagctgtttataaccattacaaacgtgtttcttttgcggaaagtcgcaacgaagaagatgttgatttgcaaaaatcaaacattttgatgattggtcctacaggttcaggaaaaacattcctagctcaaactttggctaaaacattgaatgtaccgtttgcgattgctgatgcgacatcattgacagaagcaggatacgttggtgaagatgttgaaaatatcctcttgaaattaattcaagcagctgattttaatatcgaacgcgccgaacgcggtattatttacgtggatgaaattgataaaatcgctaaaaaaggtgaaaatgtctcaattacacgtgatgtttcaggtgaaggtgttcaacaagcacttcttaaaatcattgaaggaacagttgctagcgtaccacctcaaggtggacgtaagcaccctaaccaagaaatgattcaaattgacactaaaaatatcctattcattgtcggcggtgcttttgatggtatcgaagatattgtcaaacaacgtttaggtgaaaaggttatcggttttggtcaaaataaccgtaaaattgatgaaaatgcttcttatatgcaagaaatcatttcagaagacattcaaaaatttggcttgattccagagtttatcggacgtttgccagttgtagcggcacttgaacagttgacggctgatgatttggttcgtatcttgacagaaccacgtaatgctttggttaaacaatatcaaacgctattatcatacgacggtgttgaactagaatttgataaagatgctttgcaagctattgctaacaaagccattgaacgtaagacaggagctcgtggtttacgctcaattattgaagaaactatgatggatatcatgtttgaaattcctagccaagaagaagtgactaaggttcgtatcactaaagcggctgttgaaggcaaagacaaaccaattttggaaattgcgtaaggagctgacgatgactgagtatttaaatacccacaatgcttcgcttctgttgagcgcagccaataaatcccattatccgcaagatgatttaccagaaattgcgcttgctgggcgttcaaatgttggaaagtcgagctttatcaatacccttttagggcgtaaaaatctagctcgtacatctagtaagccaggaaaaacacaattgcttaatttctataatattgatgataaattgcgttttgttgatgtgcctggttatggctatgccaaagtttctaaatcagaacgcgccaaatggggcaagatgattgaagaatacttggtaagtcgtgataatttgcgtgccgttgtcagcttggttgattttcgccatgacccaagcgctgatgacgttcaaatgtacgacttcctaaaatattatgagattcctgttattgttgttgccacaaaagctgacaagattcctcgtggtaaatggaacaagcatgaatcagcaatcaaaaagaaattaaactttgataaatcagataaatttattatcttttcatccgttgaccgcacaggtttagacgaatcttgggatagtattttagatgaattgtgataaaaggctgggtctccagtctttttttgtttgtgctatgtgggtgtaaatttgtatgcgtatgggaaattttaagttgtctaaaattgacaatcattgcttttatattttttgacagagactttcaacgctccagattgtattgcgtcttggaattataatgacacaagcaaagaagctgaacacttttgtttcagttttttgttatagtttttaactaataaattgatagataatgactattatcttttctcaaaatcttgtgctattataaacatattaaaaattgagagggttatatggaaaatcataattttgaaaacgaaggtcagtttcagcgaaaaatgaccagtcgtcatttatttatgttgtcacttggcggtgtgataggtacaggtttgtttttaagttcgggctatactatcgctcaagctggaccgttgggagctgttttatcttatctagtgggagcagtggttgtttatctcgtcatgttatctttgggtgaattagctgttgccatgccagttacaggttcgtttcacacttatgccacaaaatttattagccctgggacaggttttacggttgcttggttatactggatttgttggacagttgcgctagggacagaattcctcggtgcggctatgctaatgggacgttggtttccaaatgttccaacatggttttttgcgactttgtttgcggtgattatttttgcgattaacgccctaagtgtacgcagttttgctgaagcagaatctttcttcgcctcaattaaggtgattgcgattattattttcattattttggggctgggagcgatgcttggtttagtctcatttgacggagaacacaaagcaattctttttacgaatttaacggcaaacggtgcttttccgaagggaattacagctgttatttctgtcatgttggcggttcattatgccttttctgggacagaactaatcggtattgcagctggtgaaacggacaatccaaaagaagctgtgcctaaggcaatcaaaacaacgattggtcgtctagtgattttctttgttttgacaatcgtgattctcgcttcgctattaccaatgaaggaagctggggtttcgacagcgccatttgttgatgtattcgataaaatgggaattccttttgcggcagatattatgaattttgtcattctaacagcgattttatcggcaggaaattcaggactttatgcttctagccgtatgctttggtctttggcaaacgaaggaatgttgtcaaaaaaagttgtcaaaatcaatgaacacggtgtcccaatgcgtgcccttctcttgtcaatggcgggtgcggttctgtcactattttcaagtatttatgcggcagatacggtttatcttgccttggtatcgattgcaggttttgcggttgtggttgtttggttatccattccaatggcacaaatcaattttcgtaaggcatttttgaaagaacattctcttgatgaattgtcttatcaaacgccttttacaccagttttgccttatattaccattattcttttggtgatttcgattattggaattgcttgggatgcttcgcagcgtgcaggcttgtattttgggattccatttgtcattttgtgttatgtttaccattatttgcgttataagaagtggtagaagggatttactatgggaacatttaaagaattgctagccagtcaagattatgtgattttagacggtgctttgggaactgaacttgagaagcgtggttatgacgtttcaggcaaactttggtctgctaaatatttattggaaaatccaagcgttatccaagatttgcatgatgtgtatttacgttctggtgctgatattttaacaacttctagttatcaagcgactgttcaagggttaaaggattttggtttatctgaaaaagaagcgttggatattatttctttgacagtgactttagctagacaagcacgagataatttttggaatggtttatctgatgaggcaaagaaaaaacgcccttatcctctgatttctggggatgtcggaccttatgcagcttacttagctgacggctctgaatataatggcaattatcagctgacgcaagaagaatatcaggcatttcaccgcccacgtattcaagctttactgtctgctggaagtgattttttaggaattgaaacgattcctaatgttgctgaagctaaagccttgcttgatttattggcgacagaatttccgcaaacagaagcctatatttcttttacggcacaggatgataaacatatttccgacggaacgccgattgaagaagtagcggctctgtgtgaacaaagtcctcaaattttggcttttggcataaattgcagtagccctgccgttatttctggcttgctaaaacggattcgaacggtttcgcccaagcctttggtgacctatccaaattctggcgagatttacgacggtgcaacacaaacttggaaatccataccagataattcacacactcttcttgaaaatagcagagcttggcaccaattaggcgcaaaaatagtcggcggttgctgtcgcacaagcccagaagatatcgcatgcctagcccaagcctttcgagaataataacaaaaggtcaagataatttcctgacctttttaatatcaaatattacaagcttgcaagcgatagcggacaacgacacttgaataatggtagataatgcaagcgagatttagcgttactatccagatagttttttcatgtgtaaaatgatataaaatagctgtcgtgattgcgccgatgacaaagctaataacaacaagggagtaattgatagcttggcgcttcatagcacacgttttttcatcggcattaaaatactgatgccaagctgttatcattttacggtaattcccagacgtcatcagaatagaataagcgtgtgattcaatctgactacctgaaaatgtcaaggttaatagcccagttgctagtgccagcaagacaacccaaagtaaacgaatatctggcaatagtggcaaaatcattgtgacaatcaacaacggtagcagagcataaactctccaaaatgctgttctggcattggcacgcacatgcaaaccaaacatgaaaccaatcgagaagaaaagaacagaaaacaagcgaatcagcgtttgctgcaatggactatgactaatatcggcgattagaaaaagaatattaccagtctgagttgcgaccaaggtgttgaattgtatttgacaatagacatctaaagcgcctcccagaaagccgagtaaaatagcctcaaagcgactgttttggggcatatattctaattcgttcacatcatttccttctttctacaataagctcaatacttttattgtagcactttctcaaacggctaactagctcattttcagaaaaaatgacacttatttcaaaatcaactggtcgcctgccagaaaacttttctgaaagtcctcgacaggatgaaaatattgtttgccaaattcatcaattaatccgtggaattcttgtgcatccgcaaaggtaaatggttgcggaagttctgcgagcaatattgctaagcttttatagtcagttaaatcattaattcctaattgtgtaaataatgtacgagcgtatttatcagcgataaattgcggttggtcaaagatataagctatgagaacatcagcagtttctggtccaacaccgtgcaaagacaataagacttttcgcagtgagctaccatattgttgaacaatttttgtaggattttcctcatgcgccaaataccaactagccacttcttgaatagccttgcttttatttttcataaaaccagcagggcggacaagttcttctaagttttctttaggcatatccaccagaacttgcaaatcgtagttgctagctgctctgataagttgtgaagccctagtagcatttaattcagtcgtgttttgaatgagaatagcctcaatgatgatttgttgcttggaatcagcaggccaccaattcgttgctcccatatgtgttagcattttttgataaagattataaagtgtgagttgcatatcattatcctttgtaaactttttagttattctattttatcaaaatgccatagaaaaagcccaacttctgtgagttgagcttaataggagtgtttaaaaataggaattatttttcgctgatgactagttctccgtcaaccatgtcagctttaaggtgtttaacatctgtgtgatcgaggtagaaatcagtgattttatcgcggatttcttgttcaatgacacggcggagtggtcgaacacccatggcttcatcataaccttcttcgataaggtgttgtttagcagcatcactaaccaccaaatcaatgcctttcttggcaatggtcttgctaacttcgtcaagcattaagtcaacaatgtcgttcaaatcttctttagtcaagtgggagaattcgataataccgttgaaacggttaagaaattctgggcggaagtatggagcgatacgatccataattttcttatctttatcatcttgaccagtcaaagcttcgttgccgaatccagcattagaggtagcaatgatgacggtattcttaaagttaattgtattaccttgaccgtctgtcaaacgaccatcatccaaaacttggagaagaagtgtgatgacttgagggtcagccttttcaatttcatcaagaagaacaattgagtatgggttacgacgaacacgttcagtaagcgtgttgctattgtcgtcgtagccaacatagccagcagttgtaccgattaatttagaaacggctgtgcgatcagagtattcagacatgtcaaggcggataatagcatcttttgagccgaacatatcaagggctaattgtttagcaagctctgtcttaccaacgccagtaggaccgacaaagaggaaactaccaattggtcgattaccttcgtcaaaaccagcacggttacgacgaatggcacgtgagacggcttcgacagcctcatcttgtccgatgactttacctttcaaacggctagctaattctttcaagcgttcaatatcacttgctcccatatttgacacgggaacaccagttaatcgttcgacagattctgccacatcattaacggtagctgtaactttttgcccttccgtatggttgtcaatttgtttttgcaattcttcgatacgaactttggcattgagagctgcttcgtaatcttctttagccacagcattttcttgtttttctttttggtctgcaatttccttttcaagagatttgacatcagttgcagggtgttgagcagccaaatgagcagcagtcatatcaatcaagtcaatagctttatctggtaaactacgttgtgggatatattgaattgaaaaatcaacagcggcttttaacacattatcagggagaataacgttgtggtgtttttcatataaatcacgaattcccattaaaatattaaagctatcttgagcagaaggagcatttactttgacttcgttgaaacggcgagcgagcgcagcattcttcaaaatagtattacgatattcgtcttgagttgttgcaccgataacggtcaattcaccacgagaaagtgcaggtttgagaatgtcagccaagcctttcgaaccagagtcgccaccagttgaccctgcgcctaaaatttggtggatttcatcaaagaagagaatgatattaccagcatctttaacttctttgacaaggttttggatattttcttcaaaagcaccgcgatattgtgtgccggcttcaagaccagaaatatcaatagaaataatttctttatttttgatagctgctggcacatcaccattgacaatagcttgcgctaagccttcgacaacggctgttttaccaacacctgcatccccaacaaggacaggattgtttttggtacgacgtgataagatttcagcagtttcttggatttctttgttacgtccaataacagggtcgagttcgttagcgcgtgcgcgttcggtcaagttcgttcctaattttgccaagataccatcttctttaggagcagaagtaggtgccccttcttggtattccgcgtttccaggtagcttacctgtttggcgatattgtgcaaattcttcaggagtaacttcgcgcccattaatcaaatagcgtctgttttctgaattgtacccgcccatgttacccataagttcattaaaaatgtcatccatatttccaaaaggatctcttccgtaaaaattattatttgccataaatattacctcttttcaatcatattttctaaaatgatactattgtacgatttagtacctagaaggttaaatctctttagtctttacaaatcgtagtagagaggtcgtatttaaagagatttcttaattgttcctatcaatcaccttctgatactatcatataccgttggtcagtaaaagtcaaatatttatatgcaaaaaatctgatttttttaaaagaaaacgttttatacaaaactaaaccgatactataatctgtttttttggatttttcccatctttaaaggatatttaaaaacatgaaaagaaatgaaaaaataaaatatttcataaaaagtgttgacacaaggaggaatattggatataataattaaggttttgtaatgaaactgacctaagacagcaggggagccgtgctcataatattcctgccgaggcacaaaacgtaatgatgaaataacgtatttgtactttcgtgtctaggtttaggtgcgaatttttttgtacctagcccaaaaataataacggaggtaaaactaatgagtgaagcaattattgctaaaaaagctgaacaagttgatgctgttgctgaaaaaatgaaagctgctgcatctatcgttgttgttgattcacgcggtcttacagttgaacaagatacagttcttcgccgtactcttcgtgaaaacggtgttgaatttaaagttatcaaaaattcaattttgactcgtgcagctgaaaaagcaggtcttgacgaaatgaaagatcttttcgttggaccatctgcagtagcgttctctaacgaagatgttattgcaccagcaaaagttcttagtgactttgctaaagatgctgaagcacttgaaatcaaaggtggagcaatcgaaggcgctgtatcttcaaaagaagaaatcgctgcccttgcatcattgccaaaccgcgaaggacttctatctatgctcctttctgtacttcaagcgccagttcgcaacgttgcacttgctgtcaaagcagttgcagacaacaaagaagacgacgctgcttaatgcgtatggtagcttaacgctacaaacaattatctaataaaacaattaatattttggaggaatctacaatggcattgaacattgaaaacattattgctgaaattaaagaagcttcaatccttgaattgaacgatcttgtaaaagctatcgaagaagaatttggtgtaactgcagctgctcctgtagctgtagctgctgctggtgctgcagacgctggtgctgctaaagactcatttgacgttgaattgactgcagctggcgacaaaaaagttgctgttatcaaagctgtacgtgaagttacaggtcttggtcttaaagaagctaaagctcttgttgatggtgcacctgctaacgttaaagaaggcgttgcaactgcagaagctgaagaaatcaaagctaaacttgaagaagctggagcttcagttactcttaaataatagggtaactactcaagtagcctaataaaactgataaacccgctggtcttagactagcgggtttttttattttttactaatgtcaataatttgttcaaagagttgaagatattcaagtgatttctcgtcgggctcgttctttagtttattatttaagcgctccatgattaactcttttgttgttacattttcaaaatcgaaaaattttgttgctgaaatttgtaaaccatttaggattttttctaaagtattgattttaatattagctcgttctccacgttcaattttggcaattgatgaaacatctatatcgctatattcagctagtttttcttgggtcaaattcaattcttgtcgcaatttaaaaattctattagctacttttttatctaaattcattttttgctccttatatcaataggatataaagaaaagctacacttttacagtccttaaaaggattgttgatatggacaaaaatagaattatatggtacaatacttctaaatttagcaaggagtataaactatgaaaaaattaaagtttttaataataagtactatcttattttttgttgctgtattatcattgacgggctgttctagttcggaagagaattatgatggaacttggtctgctatttgggagactaaagggacatattatactcatgaagaagatgaagagggatattacgaagtcaaaatttcaggagataatttttattatgaggatgaaaagtggacgatagactggtctgctaataaagcaactgatgttgatggtgaaagtgaagactttatcattaaagatggtattctaactttttgggatgagaaatttgttcaggttggaagcaagttgtacaaagagtatcttgaaaatggtaaaaatagatagtaacatgaagctcctgacatggagcttttttagttataataactatgaatattaaaaaatggagaatgatatgttggttgacgttcaaaaatatttacaaccaattattgccaaacgcttaaaaaagaggataaccatgacgaggcagagaaagcgcgctatgacttcttggaagatgtattaaaaaaatataactcggttaaatataaatatcaaagcgcacttgatgatggagaaaaagttgatacagatgatgtagcagaaaaatacggttatctttatctttattatactttgacagatgagtatttgactaactcggatgagaaaacagaattattagataactataaagaactgctaaaagatataaaacagatatatgacgacaacgcagatagttaatgattttagaatagaaaaacagactctatattctatgccaaccttgattttgcatggaatacagagtcgattttatttgttaaaggttatcaatgttatttgtttcgtctaaatcaaagaaatcggtcagtttgataatcattcgttggatgtcgtgagcaattttctttggttcttctggattttcctgcatgagccaattgcgcaaggtgttgtagtaaccgccaacgataaagctcattgcataattttgggtatcaattttcccactgtaagcgaaccatggaagtgtgatactcatgtaaacttccttggcatgctcgttgaattggtgaaagaaaaaatcgtagtgttggtgttttatcaagatgtgcaatgtttcacgttcttgataccaaaagttcattgattcagccaacatatcctcaaaattatccgtttcagtaaaatactttctttcagtaaggtaacgattgataatttgttcaaaatagtgatttagcaattcatttttattggcaaaatgtcggtaaaatgttcgtcttgaaacacctgacaaatcaagaatatccttaattttgatttcttcgtagcttttattttccattagggagataagagcttgaaaaagcctatccttggtttctttagtttgttttgtttttccgtctatcatgctgcgaccccttcctaacaggaaaacaaagaaaacgagagttgggagctccttgtttatagctatatattaactctattataccactctaacctaaagtatagataaaataaggctcacataaaaatatttttacaaaatgaaaccgcatttatgattgcttagttaataagataaatataaaatttcgatccaattaagcttcgttttatctagttttggtaagtttcttctataatacaatacgaaaatttttagagctctgcccaataatagacagccttctaaaattatgataagatatgacaggttgaaggagctgtgacgtatgcaaaataattctttttattacatgtcagtcatctatttgattattttctttgtggcaattatttacaatattgcccattcaaatatggtatttgtgtatttatggtcggcgctttttttaggaaatttagctttcttaatctatagtttcgttaaaaatcataagaaaaataaatagcaataagctgataacaatgcgattatagcaagaaagccctctttttttgaaagggggcttttatgatatgttagctaatacttgcgataaggctatcagcagttgttgtcggcaagatacggacacggtctaatgataataagccgtcgctagcactggcaataccttcgttggtcgttaggccgagtttataattaaggtttgctgcaatttgaagtgttgtgtcagaataacgcccagctggataggcgatagcgatagtatcttgattaagattggtatcgagatagtttttagaatcttccatttcagaagtctgagttgcgtcatcactagctgacaagtcaggatgtgtcacggtgtggtcttggaaagacatgccgtttgctttcatttctaacatttcatcgagtgataaatttccgctatttccaacagtgcttgtaatgacattgtttgttgcttttgcaccgtatttttgcaagatagggtaagcattgtcataaaaatcccaaaggctatcatcaaacgttaaccaaacaattttactattgccgtttggaaacacattttcagttaaaactttgtaggcttcttcgggtgttaaaaagtagtaaccttcttcagaaagacgttgaatatggctttcaaatgttgtcggatcgacgatgaggttagcatttgaagcttcttccgcagccataacgtggatagcgtgatacataagaatgggaacagagacatttgaatcctgttttacccagttaacctcgttttcattggtattagcagaagagctgtcgcttgtcaccgttgatgcagaagaagtcgtggtagtatttgtatggctagcacttgatgatgacacttgttcggttttagttgttgaaaaaatgaagttgttctcctttaaagctataaaaagaaaaacacttgcgacaatacaggctattaatagaataatatttataatagctaatggcttgttgctatgtttttgatgttgacgacgtttttccataatatttaacgatctcctcgcaaaaatctactcctattgtactatttttttaagacaaagggaactgtttactgtaaattgtggaaagattttcaaaggacgttatttttctgtaaattctgaataattttatggtataatgtaggaaatgtttttatttgagagtgggtagcctgaaaatttggctatgctgttcgaaatttgcttattaaggagaaaaagatgtcaataaaaattgctttactcggttttggtactgttgccagtggtgttcctttccttttgaaagaaaatcaatcaaaaattactgaagcagcccatgacacgattgaaatcactaaggttcttgtcaaagatgatgacgaaaaaaatcgtttgttagctgctggaaatgattataatttcgttacaaatgttgatgatattttgagtgatgatagcattgacattgttattgaattaatgggacgcattgagcctgctcgtacattcattacaaaagcacttgaagcaggaaaaaatgttgtttctgccaataaagacttgattgccactcatggtaaagaattaattgaacttgcccaagataagggcgttgctttctattatgaagcagctgttgctggtggtatcccaattcttcgtacactggctaattcgcttacttctgataaagttacacgtattttgggtgttcttaatggtacatctaactttatgatgactaaaatggttgatgaaggttggacttacgaagatgcgcttaaaacagctcaagagcttggttatgctgaaagtgacccaacaaatgacgttgaaggtatcgatgctgcctataaagctgtcattttaagccaatttggttttggaatgacgattgattttgatgatgttgcacataagggaatcacaacaatcacaccagatgatgttgctgttgctcaagaacttggctatgtcatcaaattggtcggagatgtgcgtgaagttgaatcaggtatctcagcagaagtttcaccaactttcttgccaaaagcacatccgcttgctagtgtcaacgatgttatgaatgctgtctttgtggagtcaatcggtatcggggaatcaatgtattatggacctggtgctggtcaaaaaccaacagcaacgtctgtaactgctgatattatccgtatttgtcgtcgtattaaagacggtaatgttgggaaaccatttaacgaatttgttcgtgaaacaacattggcaaatcctgcagatgtgaagagccattattactttgcgattaatacccctgataaaaaaggtcaattgcttcgtttagctgaaattttcaattctgaagatatttcatttgaacaagtgcttcaacaaaaagccaatggtacacgtgcgcgtgtggttatcattacacactcaatgagtaaaacacagttggctgatgtaacaactaaattggaagcggtagaagatttccaagtggttaatacacttaaagtattaggcgaataataataactgattaagtgaaaggaaaagctcaagactacttttgagtatgataatgatatgagaattacagtaccagcaacctctgctaatgttggaccaggctttgattcggtcggcgtagcggtttctaagtacttaacgattgagattttagaaccttctgaaaaatgggaggttttgcatgatttgggtgatgttcctagtgacgaaacaaatcttttgattacgacagctttacaagtgaaagctgacctacaaccacatcgtattaaaatggtttcagacatcccattggcacgaggattagggtcatcttcatcagttattgtggctggaattgagttagctaatcagttggctcatttacagctttcggctgatgaaaaattagtaattgcgacaaaaatcgaagggcatccagacaatgttgcgccagctatttttggtaatcttgttatttcatcttatgttgatgaaaaggttaatagtgccgttgctgcctttcctgaagcctcttttgtggctttcattcctaattatgaattaaagactagcgatagccgcaatgtgttgccaaatgagttttcttataaggaagccgttgctgcctcatcaattgccaatgtagctattgctgcgcttctaacaggtgatttggaaaaagctggaaaagcgattgaagctgaccttttccatgaacgtttccgtcaaaaactagttaaagaatttgcaccgattaaagaagcagctcacgaggttggtgcctatgcaacttacctatctggtgcaggtccaacgattatgaccttggctccaaaagcaaaagaagcagagcttgttgagcgccttgaagcgctcgctttggatggtgaagttgtcgcactttacgttgatactaaaggagtttttgttgaaaaagactaatttggggattttgcttggcttaataacctatattttgtggggctttttatccctttattggaaattactttcaggtgttaattcatataacaccttttcttatcgcattatttttactgttttaacaatgttggtttacatggttttatccaaaaataaggagcgataccgtggtgaaattcgccaacttatcagtcataagcaagaacttgctatggctgttttggcaagttttttgattgcattgaattggttaacttatatctttgcagttagtcaccagcaggcaacacaagctagttttggctattatattatgccccttgtgtcaatattattagcgttagttttcctacatgaacgattgagtacatggatgactgcggcgattatcattgcaggcattggtgtgggaattttagcaattaacacagggcaggtgcctcttgtttcgatactgttagcagttacctttgctttgtatggactggttaagaaaaatgtcaagttatccagtgacgttgccatgttggtagaaagtagtgttgtcgccccttttgtgcttatctatttgctattcttttcaaaagaaagtttattagattatagcttgctagaaaatgtgctacttttagtatctggcattgtgacggcgattcctttgttgctgtttgcagaagcggtaaaacgtgcgccgttgaatatcattgggtttatccaatacatcaatcccacaattcaactggcaatagccgtgttcgtttttcacgaaaaggtaggcaatggagaagttagtggttttattttcatctggatagcgattgctatttttatcttaggacagctgatgtcgttgcggaagaaaagcaggtaaagacaaggagtttggatgcataaaaagactgtggttgatttcaaagaattgggacaccgattaatttttgaaaatccagtaaaaatattagcaacaaagttgattgatgatgtagaggctattcttaagaaagtagtttattatcaaagtcaaggatactatgttgttggttatgtcagttatgaggcaggaaaagcatttgaaaacaatttttctgtaaagactttttcgttatctggggaataccttgtttactttacggttcatagtgaagtaaaaaaagaagcctttcctcttgattacgagatgaatatcacaatgccacaagtttgggaatctaagacggataaagatgaatatgagaaagctatctcagaaattagacaacaaattcgtcagggaaatacctatcaagttaattatactgtacagcttcataatagaattaattcgaatctttttgagctttacaatcggctagtgattgaacaagatgccaaatataattgttatattgaacatgatgattttgccgtcttatcaatgagtccagaattattttttgaaaaaaatggatcaaaattgacaacacgtccaatgaaaggtactgttgctcgtgggattaatgatgcgcaagattttagaaataaacattggttagctaatgatagtaagaatcgctctgaaaatatgatgattgtcgatcttctaagaaacgatatgggacgtatttcagaattgggaagtgtaacagtaagcaaactctgtgatatcgaacaatattctactgtttggcaaatgacttcaacgattgaaagtcaattgaaggaagatttatctctatttgatatttttaacgccctttttccgtgtggttccataacaggagcacctaaaatttcgacaatgtcaataatcaatcagctagaaccttctccacgaggtgtctattgtggttctattggaatatgtttgcctcacgatgacagagcaatttttaatgttgctattagaacaattcaggtgaaggacgatcaagcaatctacggtgttggtggggggattacttgggatagtgaatgggaaagtgagtacagagaaacatgtgaaaagagtgcttttttgtataaatcacagcccacattcgatattttaacaactgctaagattacacaaaaaaaggtaattttccttaaagagcatacaaagcgtttaaaaagttcggctcgattttttggatggcctttttctgaaacagaatttttagataaaatttcagaattgcttaagacactagatttgtctgattatcgtctaagggtattacttcataaatctggtcaactatcgtttgaagtgtcgatgttagaagatttgccctcaacatttttacaggctaaattggttcaaagagaagaagcgtgtgattcaccctttacctattttaaaacaagttatcgccctcatattcctaattctgataaggaacaagttttcatttctagtgatggctatctgcaagaaacttcgatagggaatattattttagaaatcgatgggacttattatactccgccagttgaagttgggatattagatggcatatataggaagtatttaattcaacaaggagaagtaactgaacgctatttaacaaagacagatttggagaatgctgaccatatttatgtgtgtaatagcgttcgtgggctttatgagatagacattatataatctcattctattttttcaaattgttgaagtcaaaatcattatatattggaactataattacttaaacaaagctgaacattttgtccagctttgtttttgggagaaggaaaaatttgttagctattggaaaaaataattagtgctgtattctcgctataaaaattatttatggctacctataaataatttagagtacacgagcggggtataattttttataatacctttataacgtttggagggatattatgttcaattgggagtttattcgtgcgaatattcccttgtatcaagaggcgttggtgctgacgattcgtctagcattttttgggattttaggtgcttttgttttaggacttttgattagtttgattaaatattataagattcctgttttgagtcaaatttgtcaggtttacattgagttatcacgtaacacgccgcttttgatacagctttattttctttattttgggttgccaaagattggtattgttttatcatcagagatgtgcgcggttgtcggcttgatttttcttggtggttcttatatggcagaatcatttcggtcaggtttggaagctatttcgaaaacgcagtacgaagttggtttgagtatcggcttaaagccagttcaaaatttcttttatgtcatttttccgcaagctttagctgtttctttgccatcgcttgttgctaatgttatttttttgattaaagaaacgtcagttttttcaattgttgctttagcagatttgatgtatgttgcaaaagatttgattggcttgtattacgagactgatgaggcgctgttgatgttggttttggcatacttgatcgttcttttgccaatttcgttggtagcaagattgattgaaaggaggttacgtcatgcaggattcggggctacaagtgctctttcagggaaataatttatggcggttatttcaagggctgttggtgacgattaatatttctttactgtcaattgtgatttcgattgttttcggctttttattcggttttgtaatgacctcacgttttcgtatcgtacgtgtcttggctcagatttatttggaatttatcagaataatgccacaattggtactattgtttttagtttattttggtttggcacgaacatttaatcttaatttatcgggagaagttgcggcgcttattgtcttttcaatgtggggaattgctgagatgggtgaccttgttcgcggagcgctaacctcgctacctaaacatcaattcgaaagtgggctaactttagggctaacaaaaacgcagttattcatttatgtgattattccgcagattttacggcgattattgccacaagcggttaatttgatgacacggatgataaaaacaacgtcattgattgtcttgataggagttgtggaagtggtgaaagtcggacagcaaattatcgaagctaaccgtctcacggtaccaagcgcagcgatttggatatacggactgatattcttgatgtattttgcggtttgttttccaatttcacgattgtcaatgtatttagaaaaagtgtggaaggagtagagcagttgaaaccgattttagaaattagcgatttaaagaaatcctatggtgagcacaatgttttggatgatttgtcgttttcagttgacgaaggtgaggtgctggttatcctaggtccgtcaggctgtggaaaatcaactttgctacgttgcattaatggtttggaatccattcaatcaggtgttgtgagccttgagggggaagaaattttaaataaccctaaagaattacctttgattcgccaaaaaattggcatggtttttcaatcttatgacctctttcctcatttgaccgttttgaaaaatctcttgttggctccaatcagagcacaaaaacgccagcgaaaggaagtcgaagcagaagctttagaacttttggaacgtgttggtttggctggtagggaaaacagttttccgcatgaattatcaggtggacaaaagcaacgtgtggcgattgtgaggagcttgcttttgcatccaaaggtcattttatttgacgaagtgacagcttcgctagaccctgaaatggttagagaagttttggagttgattggtgaattggcaaacgaaggtcgaaccatgatcattgtgactcatgagttgcaatttgccaaagccattgctgaccgtatcatttttctggaaaatggtcatatcgttgaggaaaatgatgccaaggcgtttttcacgcaacctaagacacaacgcgcacgtgactttttaaatgtgtttgatttttcaacggttggttaagttttagtgattaattataaaaaggagttatatatgaaaattgtaaaacgttttttagcgattgttagtttgttagttgtggttttgttagtcggttgttcgacatcaaaatcctcttcttcaacgtcatctagtagttcgtcatcaggaaatacagcaaaagctcgtactttagatgaaatcaaagagagcggaacaatcaagattggtgtcttttctgataaaaagccatttggctacgttgatgataagggagactatcaaggatatgatgtttattttgctgatcgcttagccaaggatttaggcgtggatgtggaatatgtcgctgttgaccccgctagccgtgtagaatacctgacatcggctaaggttgatattatcctagcgaattttacagttaccgatgaacgtgctgaacaagtcgattttgcgcttccatatatgaaagttgcacttggagttgtctcaccaagcagtcaattaatttcttctgttgatgatttggaaggaaaaacattgattgtcggcaaaggaacaactgctgaaacttattttgaaaagaattatccaaaagttaatttattaaaatatgaccaatatagcgaagcttatcaagcacttcttgatggtcgtggtgatgctctttcaactgataatacagaggttcttgcttgggcattggaaaataaaggttacgaagttggaattacaagtttaggagatactgatacgattgctccagctgtccaaaaaggaaacacagaacttcttgactggattaacgacgaaatcaagacattaggcgaagaaaactttttccataaagattacgaagaaacgcttgaacctgtttatggagacgcagctaaccctgatgatttggttgtcgaaggtggtaacgtagattagtttcaaataactaaaacagaatttagtttaaaactaggttctgtttttttagagaaaacttactttgaagaaagtctcaggctgaagaaaaagtcttttttgatacttcccttaggtttctcgcttttttatttctaggctcagacctcaaatcatccactggactattgaaggaatccaaggaattcttaaaacttccgagatgtaggagaaacttcgtttctcttatctgcaaccttaaacaatctcccagattgtttaagcggcacaaagtatcgtttttgtgcttacttcgttcgcaaataatcctgaaatcgaacagtgagacaacaattgtttgcaacttattttgagttaaaagtaagtttgtctacattcagaaactttctttgaagaaagtctgattatcaagcttttttagtgatttcttgtgctataatagaagtgttattgtaaagtcaagacagaaaggataaaacatagactaaaaattcattatgaaaagattttgttcggaaatgacggttttacttttctttttttatgagtatttttggtcatattgggaaattcactaatgaattatcaagaagctttagattggattcatggcaagttaaaatttggaattaagcctggtttggaacggatggcttggatgttggaagaacttggcaatcctcaggaaaagctatcagctgtccatgttgtcggaacgaatggtaagggttcggtgactagctatctacaacatattttttcactagctggttatgaggttgggacatttacctctccttacattgttgattttcgtgaacgtattagtttaaatggtcaaatgatttcagagactgattttcttgacttggttgagcgtgttcgtccagtagtggaacgtttgccgcttgaaacgactttagaacctgcgacagaatttgaagttatcacggtcttgatgtttgaatattttgggcatatgcaccctgttgatattgcttttatcgaggcaggtatgggtgggctttatgattcaacaaatgtttttaaagctttagcggttatttgtccttcaatcggtttagaccaccagaatgttttagggcagacttacgcagaaattgctgagcaaaaagcaggtgtcctgaaagaacatgttccattcatttttgccacagaacgtgatgatgttcgtcaagttttcctcaaaaaagcgcaagcttgtggcagccaaacgtatgaatttaaaaaggacttttcggttaatgaaactgaaaatggctttgattatcaagggcaagaaaatctcgaggatattcgtttagcaatgccaggtaaacatcagattagcaatgctagccttgctattacggctgcgttgctattaagtaaaacgtatccaaaagtcaccaaagaaattatcaaatatggcttggtacaaacacattgggttgggcgaacagagcttatgcttccaaatgtgatgattgacggcgcacacaataatgaaagcgttcaagctctcgttaatgtcatgcaggcgtacaaggacaagaatttgcacattttatttgcagctattgatacaaagccgattgactcgatgttagcattgcttagtcaactagcggatgttgatgtaacgacgtttgagtatcacaattcgcttgctttggaaaattacccagaacaatatcataaagttctagattggaaggactgggttaagcaaatcgatagtgacagtaaagatgatttttaccttatcacggggtcgctctatttcatatcacaagtacgtcctgtgcttttgtcaagacagcaaaattaagctataatagaaaaaataaaaaagattggaagagataatggcaaatcaagaaaaactcgaagcagcagtttaccaacttttagaagccttgggagaaaatcctgagcgtgaagggttattggataccccaaaacgtgttgctaaaatgtaccaagagatgttttcaggcttaaatgaagacccaaaagatcaatttacagctgtttttacagaaaatcatgatgaagtagttttagttaaagatatcccattttattcaatgtgtgaacatcatttggttcccttttatgggaaagctcatgttgcttatttgccaagtgacggtcgtgtgactggtttgagtaagttagcgcgtgctgttgaagtggctagtaaacgtccgcaattacaagaacgtttgactgatcaagttgctactgcacttgaagaagctttggatcctaagggcgtttttgtcatgcttgaagcagagcatatgtgtatgacaatgcgtggtatcaagaaacctggtagcaaaaccataacaactgttgcaaaaggtattttcaaagaaaatcgtgaagaacgaaatgaaattttatcactgattttaggaaaataagaccttactgacacgttagcatataaggggagacatgatgaaaattggaaaacacgagattgacggaacagcttgtatcatggggatacttaatgtgaccccagattctttttctgacggcggttcttacacttctattgagaatgcccttgctcaggctgaaaaaatgattgcagcaggagctaagattattgatgttggtggtgaatcaactcgcccaggctatactttcgttgaagcagaagaagaaattaatcgtgttgttcctgttatcagagcgctcaaagaacgttttgatgttttggtgagtattgacacatataaaactgaaacagcacgggctgccttggaagcaggtgctgatattttaaatgacgtttgggctggtctttatgatggaaaaatgctggcgctggcagctgagaaaaatgttcctatcattttgatgcataatcaagaggaagaaaaatacgataatatcactaaagaagtttgtgattttttaacagaacgtgcccaagctgctttggacgcaggtgttgcgcttgaaaatatttggattgacccagggtttggttttgctaaaaacgaggcacaaaatatcgaattgctaaaaggattagatgcggtttgtaagctcggttatccagttctttttggaatttcacgtaaacgtacggttgattatttgcttggtgggggaacgttagctgccgaccgtgatatgggaacagctgctttatcagcttgggctgtcgcaaaaggttgccaaattgttcgtgtacataacgttgacgttaaccgtgacattgttaaagtgattagtcaactgagttgaaaggggtaggagagaagttatctttgccactggatagggattcttcttttctgattgattactaatatggataaaatacatttaaaaggttgccgtttttatggctaccatggagcgttcgctgaagaacaaacgcttggtcagatttttgtcgttgattgcaccttgtctgtcgatttacaaaaagcatcacagtctgatgtgctagaagatactgttcattatgggctggtttttgaaacgataaaaagacaagttgaagaagaacgctacgctttaatcgaacgtttggcaggagcaatttgtcaagatatttttgaacaatttcctccagttcaagccattaacattaagatttttaaagaaaatccgccaatcaatgggcattatgatgcggttggtattgagttagaacgggagcgcgcatgacaaaggtttatttgagcttaggaagcaatatcggcgataaaaaagcttatttactggctgcgcttgaacgcttagaacaattagcacagacttctgtgacgtcggtctcttcattttatgagacagcagcatggggaaagacagaccaagatgattttttgaatagttgttgtgagctcgagacagatttgacgccgcaagaattattacttgcttgtcaaaacatcgaaaaagagctgaagcgtgttaggcatgagcattggggacctcgtaccattgatatcgacattctgttgtatggcaatgagacgattgctactgaaaatttgagcgttccgcacccttacatgacagaacgggcttttgttttggtaccgttagaggaaatcgctccgcaacttcaacttaatggacaatcaatttcatcttatctggcgcatttaaatgtccaagaggtccgaaaacttctggtttaactatcgtcaaaagctgatttttttgatataattaaggtcggctttatgccgattttttagtagtgagttcaagtgattttaacaacatgcgcccactattttattaaagaattgtagagttggaagaaatgttagaatttttaaatgaagaattaaaaggaatcgatattcgtgttgacgaaccgctaaaaaaatacacctatacgaaagttggtggtccagcggattatttggcttttccgcgaaatcgttacgagttagcacgaattgttacatttgctaataaaaataatattccatggatggtactaggaaatgctagtaacatcatcgtgcgtgatggtggtattcgtggctttgttattatgtttgataaacttaacaccgttacggtcaatggttatgtgattgaagcagaagcaggagctaatttaattgaaacgacgcgcattgctaaattccatagcttgacaggctttgaatttgcttgtggtatccctggtagcgttggtggcgctgtgtttatgaatgctggcgcttatggtggtgaaatttcacatatcttggtatcagcgcaagtgattaccaaagaaggtgaaatcaagacaattgaagctcgtgatatgaagtttggctatcgtcattcagctgttcaagatagtggtgatgtggtcatttcagcaaaatttgccttaaaaccaggtgattatgttttaatcgaacaagaaatggcacgtttaactcatttacgtgagttaaaacaacctctagaatacccgtcatgtggttctgttttcaaacgtcccgttggacattttgctggacaattaattagcgaagcaaatttaaaaggtcaccgtattggtggcgttgaagttagtaaaaaacacgctggctttatggtaaatgtggctgatggtaatgcacaagactatgaggacttgattgctcatgtcattgacacagttgaacaaaattctggcgttcgtttagagcgtgaagtccgaattatcggcgaaaagaaacgttaaagaagctccaaggaggttttatgagaattgactaatccaattattgcgtttaaaaatgtatcaaaagtatttgaagataacggtactgttgttttaaaggatattaattttgaacttgaagaaggaaagttttataccctacttggtgcttcagggtcaggaaaatcaacgattttgaatatcattgctgggcttttagatgcgacgacaggagatgtttatctcgacggtcaacgtatcaatgatattcctattaataaacgtgatgtccataccgttttccaaaattacgcgcttttcccacatatgaatgtttttgaaaatgtcgcttttcctcttaaattaaaaaaagttgataaaaaagaaatcgaacgtcgtgtggaagaagctcttaaaatggtgcgtttggctggttttgaaaaacgtccgattcagaaattgtctggtggtcaacgccaacgtgtggcgattgcgcgtgcgattatcaatgaaccgcgtgtcgttttacttgacgaacctttatcagccttagatttgaagttgcggacagaaatgcaatatgagctgcgcgagctgcaacaacgtttaggaattacctttgtttttgtcactcatgaccaagaagaagccttggctatgtcagattggatttttgtcatgaatgacggtgaaatcgtgcaatctgggacacctgttgatatttacgatgaaccaattaaccactttgtggcgactttcattggggaatcaaatattttaccagggacaatgattgaagattatttggtcgagttcaacggcaaacgttttgaagccgttgatggtggaatgcgtccaaatgaagctgttgaagtggttattcgtccagaagatttgcaaatcactttgccagaagaaggaaaattacgtgttaaagttgatacacagcttttccgtggtgttcactatgagattatcgctcatgacgaattaggaaacgaatggatgattcattcaactcgtaaggcgattgagggcgaagttattgggcttgattttacgcctgaagatatccatatcatgcgccttaatgagacagaagaagaatttgatgcccgtctggaagaatatgtcgaaatggaagaacatgaagatggcttgattcatgcgattgaggaggagcgaaatgaagaaaaactctagtttcttctcaattccttatgtgctatggttgcttctttttgtcattgcccctgtgattatgattctttggcagtcctttttcgacattcaaggtcattttacccttgataattataaaaccttttttagttcatggacttacattcgcatgagcttcaattcgattttatatgctgccattatcacattggtgaccttgcttatctcttacccaacagcttattttttgacacgtttgaaacataagcaactcttgttgatgttggttgtattgccgacatggattaaccttttgctgaaagcttatgcttttatgggaattttcgggcaacaaggtggtgtcaatgcgtttttgagctttgttggtattggacctaagcaaattctgttcacagatttttcctttatttttgttgcctcatatattgaaattccgtttatgattttgccgattttcaatgcgcttgatgacattgatagcaatcttatcaatgctagtcgagatttgggggcaaatgaattacagacctttgtcaaagttgtctttcctttatcgcttaacggcgtgagaagtggtgttcagtcagtatttatcccaagtttgagcttgttcatgctgacacgcttgattggtggtaatcgtgtgattactcttggtacagccattgagcaacatttcttgacaacacagaattggggtatgggctcaaccattggtgtgattttaatcatggcaatgttggctacgatgtgggtgactaaggagagaagaaaatgaaaaaaattgccaatctttatttgacactggtctttatcatcctctatattccaattggttatctgattttttattcttttaatcaaggcggggatatgaatggctttactggttttaccttagagcattattcggaaatgtttgcggatagtcgtttgatgttgattctcattcaaactttctttttggcgtttttgagttccattttagcaacagctattgggacatttggtgcgattttcatctaccaagcacgccgaaaacatcagcacgccattctttcaatgaataatattcttatggtggcacctgatgtgatgattggggcaagtttcctgattctctttacccgtttagcagagctatttcatttcaaccttggttttatgacagttttgcttagtcacattgctttttctattccaattgtggtgttaatggttttgccacgtttgaaagaaatgaatgacgacatgattaacgctgcttatgatttaggagcaacgccttggcaaatgttaaaagaagtcatgttgccatatttgacgccaggaattatttcaggttttttcatggcatttacctattcattggatgattttgcagtaaccttttttgtgacaggtaatggtttttcaaccctatctgtcgaaatctattcacgagcacgccgcggtatttctctagaaattaacgctctttcaacgattgtctttctttttagtattttgcttgtaattggctattactttatttcgcaagataagggggatcgtgatgcgtagattatattcttttgtattgggcgtgattgcggtcacacttgttttgtttggcgtttctgtttacatgcaaaagacgacaagttctacaagtcaatcggataaactggttatttacaattggggagattatattgaccctgatttgattacaaaatttacggatgagacaggaattgaagttcagtacgaaacgtttgattccaacgaatcgatgtacaccaagataaaacaaggtggaacgacttatgatatcgctgtgccgtcagattatatgattgataagatgagaaaagaaaatcttcttatcaagttagataagtcaaaaatcacaggattggaaaatatcggtgacgaatttcttgggctaagctttgatgaaaacaacgattattctatcccatatttctggggaacattgggtattgtgtataatgacaccatggtagaaaacgcgccagagcattggtcagacctctggaattcggaatacgccaacgacatcatgcttgttgacggagcgcgtgaagttatggggattgggcttggaacgttaggatatagtcttaataccaagtcattgtcagagttaaatgcggcttctcagaaattagacgatttaactccaaatatcaaagctattgtcggcgatgaaatgaaagggtatatgattaatggtgatgctgccattggagtgactttctctggtgaagctagtgaaatgcttgattctaacgaacacctgcattatgtcgtgcctagtgaggggtcaaatctttggtttgataatttggttattccaaaaacagccaaacatatcgacgaagcttacgcttttatcaattttatgttgaaacctgaaaatgctgcgcaaaatgcggaatacattggttattcgacaccaaatgacgctgccaaagaattgttaccagatgacgttaaaaatgaccaagccttttacccttctgaagaaaccattgaaaaccttgaagtttatgataatctcggacaaaaatggctagggatttataatgacctttatctacaatttaaaatgtatcgtaaataatgattttaggaagttgagacgaagtgctcagcttcttttgatttgcatctcgaaaagttatcttagttttgataaaataatagtgactaatatttcaggaaaatcgcaaacatcgtaaaaagtttgttgcatttgagaaattaaggagttttatatggatagttatcatcgagaatatgaattttcgctttcctctattctcagttttgtttggcgagggattgtggttggctgcgtgtcaggtatcgtggttagcttatttcgccttttgattggtttcatttctgccaaagttgtcaattattatgagttgtcacacgaacacccaagttttttaattctcattttgggagtgactttgttcattgtcattgctattggctttttgattaaatccgattctgacatcaaaggttctgggattcctcatgtcgaaggggaattgaaaggattgcttcacccagattggtggtctgttctctggaagaaatttgtcggtggtgtcttagcgatttcaatgggatttatgcttgggcgtgaaggaccaagtattcagttaggtgccatggcaggaaaaggtgttgctaaatctttaaaagcagaacgcatggagcaacgtgttttgattgcgagtggtgcggcagcaggcttatcggcagcttttaatgctccgattgcaggtttgctttttgttatcgaagaaatttatcatcaattttcacgtttggtttggattaccgctttagtcgccagtttagttgctaattttatttcgcttaatatttttggtttgacgccagttcttgatatgccaggagatttggcggtattgccattgaagcactattggattttactattgctgggtgcttttttaggcgttatgggatatgtttatgaaaaaacgactttgaaggcaactatcatctacgactttcttggaaaagtgtgtcacattccaagtcatttttacggtatctttgctgccattttaatcttgccaatcggctatttctatccgcaattgctaggtggcggaaatggcttgattacttcattatcgacaagtcacctaactcttatgattgtttgtttatactttatcatccgctttgtgtggagtatgttgagttactcaagtggacttcctggtgggatttttcttccgattttgactttgggagcacttttgggctttggttttgggctattttttgaacaattcggtttgtattctagtcattatttgtccttgtttgtcgttttaggaatggcgggctattttggggcgatttcaaaagcgccactgacagcaatgtttttagtaactgaaatggttggtgatttccgtcaattgatgacgattgccgtggtgactttggttgcatatatcgcaatggatttgttaaaaggtgagccaatctatgaagctttacttgctaaactttctgtgccacaagatagagaggtcatcgaaccaacgttgattgaattaacggtttccgataaaattgctggaaaatacgtcagagacttgacacttcctaaaaatgttcttattacaactcaaattcatgccaaaaaatcagaagtggtatcaggtaatacacgcttaaatgcaggcgatacaatctttttggtggtcaatgagccagaaattgggaaagtcagagaattgctaatgtaatttgaacgataaaagaatttatgaattccctttcattttgcaaaaagttttggtacaatgggagaaggtaagaggattgttactggttaagcaggcaaaacctagtgtacatttagagattgtgttaaaacgcagtgctttttgtgtacgctagttttgccttttctttccgaatttttttgaggagtagtagaagatgaaaattgataaagtctataataacaatgttgttttggctaaaggggatgacggagaggaaatcattgtcatgggaagagggcttggttttcaaaaaaagccaggtgatgaaatcgatactgctttagttgaaaagacgtttgttatgcaggacaaagatacaaccaatgaattgacacgtgtctatcttgatttatcaccagcagaaactgaggtcgtcctcgacattatcaagcatggtcaagaagttcttggaaccacttttgatactgccttttatattgctttagcagaccacttgcattatacgcttcaacgaactcgtgaaaacataaccattcaaaatccgttatcatgggagattcgtaaattttttccaaaggaatatcagcttggaagggatgcgttaaagattatctttgaaaagctaggtgtcattttgcctgatgatgagatttcatcgattgctttgcattttatcaatgcccaaaaagattcgggaatggtagagcaaaattatcagatttcaaagattgtcacggatattttaggcattgttcgtctgttttatggcaaggtcgttgatgaagattcggtaagttataatcgttttattactcatattcagtattttgctcagcgtgttgttaatggcgttgttcaaggaaaaaatgatagttttttatatgaacaagtcaaattaaactaccccgttgccttttcatgttctgaaaaaataaaaaattatatcgaaagtagttatgattttccaatgagtcgtgatgaacaagtttacatcaccattcacattcaacgtttggaaaccagtcataactgataaaaagcattagatttctcttcaaagtgatttgaggagaaatttttttgtaaaaatttttaaaatgaaaacattgtgaaaaatgttgtaaattcgctttgtgacaataaaaggcgaagaattcgttttcataaattatgaaaatgttgttttgctgtaaaaaagttttaaaaaagcgcttgcaaaacatgaaagcgcatgctatactatgaattgttaaaaggattgttactggttagcaggcaaaacctaaatgaatacaagataattttggcgttaccgcatgggcgcaagaaattgtttggtatttgtttaggttttttctgttgtttaaaaccagaaaagagaaaggagccagatatggctaaaaaagactatacagagttggcaaaagacattgtcgctcacgttggtggtaaagataatgtcgttaatgttcgtcattgtgttacgcgtttacgttttgtcttaaaagatgaatcaaaagcagatgacgattatttaaaacaacgtgacggtgttgtgactgttgttaaggcaggtggacaatatcaagttgttatcggaaatcacgttcctgatgtttatgcatctgttcttgaaacgggtgtttctggtgttggttcacttgatgtcgatgaaggtgatgatgttgaaaaaggtaacttattcaatcgatttattgatttgatttctggtattttccaacccttccttggacctttggctgctgccggtattattaaaggtattgtagcaattatgggagcttttggattatcagaagcaaatagtgcttggtatgttatccttgaagctgctggtgatggtttcttccaatatctaccacttttaattgcggttacagctgctcgtaaattcaagatgaatgagtttacagcgttagctatcggtggtgcacttgtttatccaacattaacaactactattcctgcattagcagatgctggacttgataaaatatttggaatttcacttgaattaccatcatcaggctcatatctctcaacagtaatgccaagtatccttgcaatgtgggtggcttctcttatcgaaaagaatatcaagaaaatcacacctgatgttgttaaacttttcgttgttccgtttgtaacaattcttgttactgttccgttaacattcttggttgttggtccagttgctaatctcctaactgactggctatcagcaggtttccaagctgttcttagtttcagtccaattctttatggattcttacttggtgctttgtggcaagtattggttatgtttggtcttcactgggcacttgtgccacttgcaattatggacgttgctactaatggtatgtcagctatcttggttgcagcttgccttcctaactttacacaaactggtgttcttggtgcaatcatgcttaaaacaaaagaacaaaaagttcgtacaatttctacaccagcattcatttcttcaatctttggtgtaactgaacctgctatttacggggttacacttccaatgcgtattccattttacatttcatgtggagtatctggtattattggtgcgctaactatgttctttaatgtttatggatatagcgttggtgcaatgggagttttccaatatccttcatacgtaaatccagcaaatggtgatatgtctggtatgtgggtaatgattgctctatctgttcttgctgttgtcctctcatttgtagttcaaatgtttgccccagtcccttacctttacggtggtccaaaagatgcctctgctacaactgaagaaaaagtagtagaacctgttaatgatttaaaagaattaaaacaagaaattattgctagcccaatgatgggtgatgttgttaaactcgaagatgttcctgatgaagtttttgcttcaggagctatgggtaaaggtattgctatcaacccagcagaaggtactgtttttgcaccagcaaatggtgaagtgacacttgttttcccaactggtcatgccattggtatgcgtactgaaaatggcgctgaactcttgattcacgttggtatggatactgtatctttggaaggaaaaggtttcaaaacatatgttgaagttggtgataaagtcgaagcaggacaaaaattgttagaatttgacttagcaaccattcgcgaagcaaacttacctgtcatttctccgatcattgtgacaaattcagctgattttgatgatgttttgacaacacaagaagcacgtgttaacacaggagattatctcttgacaacacttgcataattaagttaaaaggaacgctgttaggcgttcttttttgactggaaaaattttttgatacttcctcggaagcgacttcttgtggaattctatgtccaagttttaagcttgaagtctccaaacttcaattcattgcaactaaaaacactaagcatgcttgttgtcatccttagtgttttgttgttaatttttgagatttcgtgatgggtgaggtccgatgtagtgggcttttttgaattgtttgcggtattggctcggtgtgagttcgtagtaacgtttgaattgtcggttgaaattagataagttgttaaagccaacagtggtagcaatttctaaaattgggtcagccgtgttgattaataagtcgcaagctttgttcaagcgaacttgaatgataaattcggtgcaagatgtgccagcgtgttgtttaaagactgccataaagtgcgttttgctgtaacccataaattgtgaaagaaaatcaatcgagagatttttttgataattattgttaatgtaatcaatcaattcacgaatttgctcgtttttgcggtaagcatcatcagtatttttacgtaatacataatggtgatagaagagaagatataagaattcgtttaattttgatttgagtagcagttcaaaatgacgtccttcgtttttagaaagctcaaaaatggtaaagagacattctttgatatcctcgtacccttccattcctggttgaatgcgtgggacaaatttgtagagactggtttgcaacggttgcaaataccttagactgacttggtcaacggtagaatgtccaatcatatcgaggtggaatcggaaagtatcagtgacgtgtttttgattttcaagtgggtgaatcgaatgcattccatttggacggatgaggataatatcacctgcttgactgttaaaataatcataatcaatgtggaaacgagccgagccctcgtagatgtaattaatttcgatttctgggtgccaatggaaaaggacgtcaggacgcccatgttcaacaaccgtactgtaataatcataaggcaagagatgtttgttttcatctatttttatttccaatgggtcagtattatttttcatatagtcatcatcccaatcatagtatagtattattatgtaatattattatatcaaaagcgcccaaaaattggaaacggatactttgattttttccgaaaattttctttttaatatcgtgttaaagtatcataatctgaaaggataatgttagcgctgtgatagacaaagcattataatttaggtaaatcatgaccaagacctctcaaaactgatagcagggctggcgtgatttaagtgtttggcaaacacacctcttatacccttacaaactccgcaaagacaacgcaatctcctttgttttaggcggagtttttgtttttggagtcaaaaatatcacctctattgtcagaaaatttcatgaaatgattggtttcctttagctattttgacttaaaagtagtagaatgaaagggtaaacaattgttataaaaatcgttcaaggaggaattatcatggatgaattgaaaaaagttttgttagctggtattggtttgacttcaatgactttggaaaaagctgacgcttttgtcaaagaattggttgaaaaaggtcgcttgaccgttgaagaaggcaaagaattacagtctgaattaaaacgaaaaggcgaagatgaagcaaaagaattacttgaccaattggatgttaaaacaaaacctgttcaatatgctactaaagaagatgtttctcgtcttgaagataaattggatgcgctcttgaaacaatcagcatctgatgataaagagtaggatgatttatgtcaaataagcgcttaagagaaatcatcggagctttcagctcggtcggtttaacaacgctaaaagaaaaaggaaaacctatcgaggacaaatcaacacctcgtaaattacgtttagctttcgagaaattaggtcctagttttgtcaaaatcggacaaattctttcaacgagaagtgatttatttcctgaggcttatattagagaattaagcaagttgcaaagtgatgttcttccattaccgcaagaggttgtcatggaggcaattgctgcagagttgccagtacccatttcggaagttttttcggacatttcgtcagaagctttggcaagtggctcggttgctcagacacatcgagctactttgcttaatggcaaagaagttgttgtcaagattcagcgaccgcatttgccagaaattatcgaagaagatttagaattgttgattggcttgtcgcggcgcattcccaaggcaatgttgcctatggttaatttatcagaggttttgcagcagctcaaggatagcttgacgaaagaaatcgattttcgtaacgaagcgcaagcgatgcttacttttgctgagttaaatcaatcaataaaatgcattgccattcctgaagtttttgacgaatataccacaccacgtatggttgttgaggagtatatttcaggaattcctatcaatcattatgaagaattgattaaagctggctatgatttggaagacattggtaagaagctgatgctaagttttatcaaacaagtctttaaagacggctattttcatggtgacccacacccaggaaatctctttatttctgaaggaaaaatttattttattgactttgggattatgggaaatctggaaaatggcatgcgcgtggcattaaatgatattctttacagctttacggcacaagatgtcgaagggatgatgcaaggcattttgtctgtcacaagttttgatacttcaataaataaaacagcacttagccaagatgttgaacgaatgctggcgaaatattctagtttggatttgggtgtcttatctatcacagatttattggaagatttgctggacgttttcgtcaaaaatggcttgaaggcttcgccacagattacgattttggaaaaagctgcgctacaaattgaaggaattttccgtgaattagcgccagaagttgacttgatgacgcttgctaaaaattatttcttagaaaatatgggacctgatatgttaaaacaggctctgaacaaggaaacattactgattgagctcttttatcaattgaaaaatgggaaaaatattccacgtcggcttaatcagttacttgaacagatgctcaatggtcggattttaatcaatcatgacatttatgattataaaaatcgtattaagaccgtcagtcaaatagctaatcgctttgttgtgagcattttatttctggcagttatgttaaccgcagctctgcttagttttaatgtcgcaatgcaagaaatttccaaatttctttttggtcttgctgctcttttattggtatgggagcttgtcttgatgttcaaacataaataaagatgtcaaaaatttcctaataacttaggaaattttttctattctcgtttttgtaaccgcttgctataatattcttgtattaatcgaggaggttatgttatgtctaaattaccagaaaactttttatggggaggcgcagttgctgctcatcaacttgaaggcggttggcaagaaggtggcaaaggtttaagcgttgctgatgtgatgaccgctgggcgccatggtgtcgcacgtgagattaccgacggtgttatcgaaggaaaatattatccaaaccatgaagcgattgatttttatcatcattacaaggaagatattgccttgtttgctgaaatggggtttaaatgtttccgtacgtcgattgcatggacacggatttttccaaatggtgatgaattggagccaaatgaagctggtttgcaattctatgatgatttgtttgatgaatgtttgaaatatggcattgagccagttgtgaccttgtcacattttgaattgcctttccatttggtgaaagaatacggtggcttcaccaatcgtaaagtaattgatttctttgtccgttttactgaaacgtgtttccgtcgttacaaagacaaagtcaaatattggatgacgtttaatgagattaataaccaagccaattaccaagaagattttgcaccgtttacgaattctgggattgtttataaagaaggcgatgaccgcgaagcgattatgtatcaagctgcgcattatgaattggtagcgtcagcgcgtgcggttaaaatcggtcatgaaatcaatcctgatttccaaattggttgtatgattgctatgtgtcctatttatccagcaacttgcaatcccaaagacattttaatggctcaaaaagcaatggaaaaacgttattatttcgctgacgttcatgtgcatggctattatccaaatcatattttgaaatattggcaacgtaaagaaatcaaagttgatgtgacagaagaagatttggctgatttgacggctggcacggttgattatattggtttttcatattatatgtcatttgcgattgatgcacaccgtgacaacaatccacactttgattatttagaaacagaagatttggtccgaaatccatatgtaaaagcgtcagaatgggattggcaaattgacccagaggggcttcgttacagcttgaactggtttacagatatgtatcatttgccactttttattgttgaaaatggttttggtgcgattgaccaagttgaggctgacggcatggtgcatgatgattatcgcattgcttatcttggtgctcatatcaaagaaatgattaaagctgttgatgaggacggtgttgacttgattggttacacaccgtggggttgcattgatcttgtttcagctggtacgggtgaaatgcgcaagcgttatggctttatctacgttgataaagatgatgacggtaatggtacttataaacgctcaccgaaactttcatttgattggtataaaaaagtcattgcttctaatggtgaggacgtttgagtgagttaataacctttatgagactgtaatctcctgtctcatgaaggtttttgttagatgagaaaggataactgatgattggattgattgccgcttcactaaccaccttgggctttgttccccaagtggtaaaagtcttaaaaacgaaagatacagaatctatctctttaggtatgtatagcatgtctgtgacaggaatgttactctggctagcacacggcatttccatttctgacattgctttgattgctgcgaatagcatttccgctacactagcaggaacgattctgatttgcaaactgatttataaataattttttaaaaattctcttgagcgctggtacatctgcgttttagaggattttttgattgaaaatttgaaatgaattatcctatttaattgtcgtgaaatccgttgatagtaaaggattgacagggctttcaaaaaggaatatactaatcgcgtaaaataaaaaaataccatataagggaaaaaggaggcgtagtatggtaggcattatcgttacaatttttattattttattgattgcggcagttgtccaagctttccgcgctaagatttgggtaaccaaaacatttgggtataattatgtgattacaatgacaaatggtggcaagctgccagatttaagccaaaataccaagctaaaaaataatgttagagttgttggcaaatctgaacagagttgttcggtgcaatctaggcttaatgatacagagctcaagacgcttttgatgaaagaataccatttagattcaaacgagattcacgtgcaaacagcgcagttgtcaggagcacttggaatgatttagaaagagagcggagtgatgaattggattattcttgcttttgtcataatcattgctggtgtttgggtatttagtagccgttatcaaaaggaatactatgcgcaaggtgagcaaatgggaggtccttatctcattcagtttaaagacgttgacatcttgccagaattgctaagcaatcgtaaattacgagaaacaattgacgttatccatgctgacagcaacggcaaaaactaccgtgtgtactctaaaattaatgataaaaaattgcagcagttgattgtaaaagaacttggattaaccactaatcaagttcaggttatctatataaaattatatacttttgtttgaaaagaacacactttttagaaacaaatattttttagttagaaaatcaggaaaaactcaggcgaaaaaaataactttttcgtctgttttttagttttatgccacaatcattacggaaattgtaagcctcttaatcttgattttccgcacttggtgaagtgttttccttatcaaagaggaaaaagagtacatttacttcgtgtaagcgtttttataaaataaacgtgtaaataaaaaacaaaggagattcacattatggctaaaaaagctttaattatctgtgctggtgggatgtcatcatcaatgattgccaaaaagacaatgacactcctccaagaacaaggaaacgacattgagatggatgccgttggtgttccagaaggacaaaaacgcatcgaagctgacaaatacgatttgtatcttgtcagtccacaaacgaaaatgaatttcaaacaattggctgatgcagcagcaaaaacaaacaaaccaatcgtacaaattccaccacaagcgtacattccaattccaatgggaattgaaaaaatggctgttttggtgaaggaaaatatctaaattgatgtgttataatggttctattgttgtttggaggtgtccttttctgtgttaaataaaaaagaaaagcaaattatccaatatctgatgaaagatagggataaatttgttactagtaaagaactagcagcacatttgaactgttcggacagaacaattagaacttactataaaacacttgttgaaaaattagatgattattctggaattgatttgatttccaaacaaggttatggctataagttagacgttttagatgacgacgctttggctgatttcttggaagaaaatcatatcaatgaccaccattttgattatcaaagtattacggatatcaatgaccgttacaattatctgctaaataaacttttgtttgagcaaaatgaaatttattttgacgatttagtagatgaattatatgtcagtcggtcaacgttatctagtgattttaaaaagataagacaaaaatttaaaccatatcatttaaagattgaaagtaaggctaataagggtgtttacgtaacggggtcagaacgtgataaacggcgattcatcatggattattttatttcatctggttttatcgataccatgcactcttatgttgataatgaattgcttaatcagaggatttcttttgaagagttgaccattattgtgcttgatgaatgtcgagagggtgggctcaagctatctgattttgtgattcaaaatttggtgattcatattgctttagctattcgtcgcattacggaagggtttaaaatcagtaaattagaagaggaagagttaaagctacgtgaattaccagaacggcagattgctgataatatcttaaaacgtgtgtccgtatcaacgggaattgattttccagtcgaagaagtagattacattactctgcatttgatttcaaaaagtcatggaaacgcgcgctatgtttccgaaagcatgcaagagcagatgcgtcaagagctcattgacagtattgaaaaaatcaatccagaagtcaaaaacgattttcagttaatcgaaggacttttggcacatttatcaaccatgttgattcgtttggaaggtaaggtggtcttagaaaatcctttgactacggaaattcaagctaattaccaagaaatgtatcaattggcagagcaagtcattaccacaatgccaacttttcaatcattttctttaacgccgaatgaaatcgcatacattgcgctacattttatggctgctaaagaacgttacaaagaacaacgaaaatacaatgttcttgtcatttgtgcaacggggtatggaagcgcacaaatgttaaaaagtaggattgaaaatgaactgggaaacctgatttcgattacggatgtgattggttattatgaaattaatgatgagaaattaaaaggaattgactttatcgtttcttcgattgatttgtcaaatttgattttcaatattcccgtttttactgtatcagtttttctgacagatgaggaattacaagagattaagcacggcatttcacatttaaatacgtcaacgtcattgagaaaaatggaagatgagacttctgaacttagtgtcagagaagtatttgacgactatttttcaaaagaagctttctttatcttgtccaatgtttctaaagacgaagtattgagaaagctggtaaaaagcatttctaaacatgaaaatgaccagtttgaaaaacgtatgcttgatatgatgaaacaacgtgaagcaatgagttctattattttcggtgaacacatcgctgttccacatccgatgaaagctgtcggtagtaaacatcattttgcggttgctttaattcaagatgagttattatgggatgaccaatatccgtcaatcaaaattgtctttttaatgtcaatgtcaattcatgaaaatgatggcttgccagagctaacctctgccattgttgatttggttgatgaaccagaccttcaagagcaaatgttagcctgccaatcatttgaagaatttagaacattattttttaaaataaaagaaaggtaggagttatatgaatccagaagagttacaagtcgcagcatttgaaattatcttaaattctgggaatgccagaacaatggttcatgaagcctttgacgccatgcgcgaaggcaattatgaactggcagaacagaaattacaagaatcaaatgacgaacttttgaaggctcatcaagcacaaaccaatttgctacaagagtacgcaggtggtaaagagattaaaattgaaatcatcatggttcatgcccaagaccatttgatgacaacgatgacacttcgagaagttgcacttgaaatgctagagttatataaaaaagttaattagttgagaggggataaatgatggcagctttaacagaacaagagaaaaagaagttagatgaaacaagacgtgaaaatgggataaaaaatatgtattacacacgttatttcctaattcgttatgtggtagcatttttcttctttgtcaatctctattggatattgatgtttttctctactgataatgtgagtttcattgttatccctttctttatggctgtattcggtgccatttgtatgtgggaacaatcacggatgtattcaagagaacaaaaaccagctgttaagacaaaactgtattttcaactgattattgcagtaaatattgttttaattttagcgactttgtttaaccaatatcattatttttacccattcttatctgaatctacaacgactcaaatttttcttatcgtgatgttattacttgggattcttatggcatcatggatgctagtaaaattaggacgtattaatcacaattcagataagcaatattatcgtattcaacaatatttggcatcactaaattaatcaatcacaaacattctatagtttttaggaggagtaaaagatgtttgaatttctagaaaagtacctaatgggaccaatgggaaaagtttctacttggcgtcctgttcgtgctattgttgccgctggtatggcaagtattcccttcaccattgttgggtcaatgttccttgtattgagtattatcccacaagcatttccgattccagccttgaccacactttgggcaaactcggttgataagattgcaccgctatacttgcaagcttacaactgtactatggggattttatctctttactttgccattgttattggttatgaatatactaaaatttttgcagaagaagatgacttgaatgtagatcctgtttatggtgctttgctttctgtatttgctttcttcttaaccattccagaattgttagtttcaaatggtgcgtttgattaccttaacgttgacggtgctactatcaatggttggacaatcggtggtaatagcttggatcgtttgtcaacatcaggtatgtttacggctatcttgatgtcaattcttgctgttcaactttataaaacatgtatcaaacgcaactgggttgtaaaaatgccagaagctgttccagaaggtgtttcacgttcattctcagctttgattccagcaggtgttgtagccattgttgttcttgttattaacggtatctttgttgttttaggtactgatatttacaacgttgttgctattccatttagtttcgttaagaacattgccaattcatggcttggtattgtggttatttacctccttgttcacgctttgtggattgttggtattcatggtgcaaatatcgttatggggcttgttaacccaatccttttagcaaatatggcagaaaacgttgacggtgcacatattgcatacgctggtgaatttacgaattcatatgtcacaatcggtggttctggtgcgatgctccttgcttgtgtatggttggcttttgcagctaaatcatctcaacttaaaatgcttggacgtgcagctatagggcctgctatcttcaacatcaatgaaccattaatttttggtcttccagttgtctataacccaacacttgcattgccgtttatgcttgcaccaattgtcagtgcaacaattggttactggtcagttaaaattggatttgccgccgtatcaatcattcaaacaccatggccaaccccaattggtttaggtgcctatgttggttcaggtggtagtgttggtgccttacttacagcttttgtctgtgcggcagctgcattcttggtttggttcccattccttaaaatgtatgacaaccaacttcttaaagaagaaggtgttgaagcttaagtcactgcatcttgcttattacaactatataaataatgaggttgggcacttttgtccaaacctctttttcatagaaaggacgtgaaaatatgggagaattaggaatttctatctatccatcaaaatcaaatttaactgagatgaaagattatatagcgcaagcggctgagataggttatcaacgtatttttacctcgatgttagaggtagcagataatccaagtgaaacaattggaagatttaaagaaatcattgactatggaaatcaactcgggatgaaaacgtcgcttgatgttaatcctaaattgtttgcaaaactcggcatttcttatcaggatttgcaattttttagtgatttaggtatttggtccgttcggttagatgaagggtttacggggcttgaagaagccagaatggcaatgaatccttttggaattttaatcgaactcaatatttcacgagggcagcattacattgatatggtcatggattttggggctgataagaatcgagtaattggctcacataatttttatcctcaagcttatacaggcttggactttgattattttgtgcaaactgcagggcaatataaatcacatcatttgcgcacagcagcctttgttgattcaatgaatggttcggttggtccatggccagtatctaatttgatggtgagcacagaaattcaaagacagttacccataacagaacaagttcaactgcttaaaatgacagatgtgatagacgatattattatcagctcgtcatttttacctaaagaagagttagcagcagtttatcacgtattttattcatctgttccaatgttgtcggttcatttagctaaaaatgtgacagaagtggaaaaagatgttattgtcacccctttacacatgtatcgtggagattattctggctatatgattcggtcgtcagaaacgcgtattacttataaagactcaaattttccaacacatgacatacaatctttgaaaaaaggtgacattacgatttgtaataatgcagctggtcagtacaagggagaattacagattgtgctaaaagaccgcccaaatgatgggagctttaatcttgttggcagaattaaacagaacaatttgccgatactggatttattgaaaccatggcaacagtttaaattacaaataagtagttaacctcaaaaatccctatattatcttgtaatatagggatgattttcgttaattttctgggacgtcagcggatgctgagaggtcgtggagttctttgaattcggcgagttgtttgctgtatttatcaataacggtatctgtcgcgaaagcaccaagtgggagacgaagtggaagttgtgggttatttgtcacttggtcgtagatgatttcagcggctttgattgggtcgcctgcttcgtgtccagcaccattttcatttgtggtgataaagtcagtaaattgttggtagtcctcgatagaaggtaacgctttgtcagaagaacgtcctgcccagtcagtgcggaaacctgacggttcgataatgagcacttgaatgtttttgtgagcgacttctttagctaaggattcgctaagtccttcaactgcatattttgttccatgatagaaagagagtgtcgggaatgaatacaacccaccgatagatgaaaagttgataatcacaccttcattttgtttgcgcatggttggcaaaacagcgcgtgtcatatcaacaagtccccaaacattgacatcaaacatatattgtacagtttcacggttactttcttcaaatgtgccaaaataaccgataccagcattgttaaccaaaacatcaatactgccaaatgtatcaagcgttgctttgacagctttttgaatctcttcttgattggtaacgtcaagttttaatttcaaaatttgaccgtggtcaaactcatcaaggtagcttagttgttctggtttacgagcggtagcgacaagattgacatcatctttttgagctaataaacgtgccaattcttttccgaaaccagttgaagtaccagtgataaaccatgtttttgtcatcataaattcctccgtaaatttgatgactttattataaaaaattgtgccgatttattttggtagttttccacgctttttggtaaaatttcagtagaaataggaaaaattctacttttcaagtattttaataccattatttttagtacaattttcttagagactagatgaaagagaggtggtctaaaatgcctgatgctgttactcgaaaacaaattgattaccaagcttttttaaaccgtgagagccagaaacgtcatcatcgttatgatgaagaattgcagcaatacagctatctcaaaaatggtgatttggaaaatgccataaaggctaccaaacagatgtttcggtcagatttgacagggcatctatcggaaaatccagttagaaattatcaatatctttttgtcgcatcggtgacacttgccacacgctttgcgattcaaggtgggttagatgaagaagtggctttcaacacaagtgacctctacattcaaaaagtcgataaacttgataatgtaccagatatttttgacttgcaggttgaaatgtttaccagtttcacaaaattggttaggcaaagcaagctcgaccaagcacaatcacttccgattttgcgttgtattgagtacattgacttgcatttgcatgagacgattactctagccgatttagcgaaacacacaggctattcaagtaactatatttcacaattgttcaaggaacgcatgaatcagtctgtcaagtcttacattcaagcacagaaaattgccgttgccaaaaatatgctactagaatctgactactcacttctagaaatcacagaaacactttctttcagctcgcagagctatttcacaaaagtgtttaagaaaatcgttggaatgacacctttggagtataaatcaacgtttatagcaaatgctattgaggaaaaatcgaagaatagctaaaaagcaaacaaatcagacctctaatttgtttgctttggtgaataatattttttacatgccacgtttaagttttgagtttggaatggctcgttcagcgtgaattttagctttttcttcatctgataattggtgattagttatccaagctttttgtgtatcttcgtctccacaagcaacgttcgtttttccttgaactagagcatcgtaagcttgtttggcaatatcaagtggtgaatttttccaactattgtcaccaaatgctgttgtttgcatacctgccttagcgtggaaatttgttgccgtagctcctgggtgagcagttgtaatttgaatatttttgtcacgaagttcctcgcgaatactattggcaaatgaactaataaaggcttttgacggtccatatacgctttcgtatggcgttggagtggttgcagataaggaactaataaacaaaatcttcccgccgccagctttaatcatatcaggtaaaaagccgtaagttaatcgtactggagataacaaatcaagcgagataacattcaaatgttcttccaaactatggtcgataaaagcaccaccaacagaaattccagcatttaagacaagcaaatttagcggttcagcagtttcttttacggcatcaatgagttcttgatttccttctgcggtgattagattacatcttacagcggttactctgctaccaagcttttctaactcttttttcgctgtttccacatcaccaatacctgcaatcactagattatagccgtttacagccagtatttgggaaatttcaaaaccgataccagcatttccaccagtaacaagtgctaaagttttagtcatcataatatcctcttttcttgtttgatgtcttcatcatagcagaagaggtattgaatttttggtaaaaaagaatgataattggttatttttatggttaattttgcggaggactctattttctaaggaaaattgaacgactattcttgacagactgaaacaatgtttttaaaatgtctggtagaaaatgaactttttgagacaacctttaaaaaggtgacgcttatttaatcatattacttttgtagttttagatgagaggatttattttatgaaaatgacagaacttgaaaaattacaagcaggcttgccatattgtttcacggattcagctattgaagccattaaaaaagaagcacttaggaagtgccaagctttgaacgctattgacattttaaatacggaagaacgaactgcggcgattaaagacctttttggaacgactggtgagaatgtctctgtctttccaaattttaattgtgataatgggaaaaatatccatgtcggtgaacaattcttgatgaattataatgggattattttggatgttgctgaagttcgtatcggtcatcatgtcatgattggtccaaataccatgattacgactgttaatcatccgctaacaccgcaaggcagacgtgataacattggtatcgcgaagccagtcacgattggaaatgatgtctggattggcggcaatgtcacgattcttccaggggtgacaatcggtaacaatgtcgtggttgccgcaggtgcagttgtcaccaaggatattcctgataattgcgtcgtcgcaggcgtaccagctaagatgattaaaaccattgacaatgatatagactgatgatgtcacactcaccatgagatttctatttttgaaaatcttgtggtgatttttcatatcatagtattagtttttctgataatagacaaggatattttcaagaaaatagcgtataatggcggaaaaggagaagcttatgacaataaaagtaatcgcaacagatatggacggaacgtttttaacgaataacaaaacctatgataaagtactttttaaccgtttatttgataaatttatggcagatgatattaaatttgtcgtggcaagcggtaatcagtaccgtcaaattattcaacaatttcctgaacataaacatcaaatgacgtttgtggctgaaaatggcggtcacattattgaaaatggcagaaccttgcaagaagcttttgagagcgcagaagcgatttcagctttggtgaattatattgaaaagtattatcccgacacggtgattaatttggcagggaaagactcatcttaccttcctgcagcgacacctaagaaagtgaaagacttgctcagttattatttgcctgtgttaacttacgttgacaatcttcacccgattccagatgatcattttttcaaagtaaccttgctggttcgtgacgatttgacgttcaaagttcgtgatgacattgacacgctttttgctgattaccagctaacggctacttctagtggttttggttgtattgacgtgattccctcacacgttcacaagggaacaggacttgattttctacttaatcattggggctatgctccagaaaatctcatggtatttggcgatggcggcaatgatattgaaatgctaacactagcaaaatactcatttgcaatggcaaacgctccgcaggaaatcaaggctgttgctagctaccaagcgccgtcaaatcaagaaaacggcgtgttacaagtcttgtcaaatcattttttgaaaggtattgagttgtgataaaattaattgcaagtgatatggatggaactttcttgaatcctcaaggaagttatgataaaagaagattccaagaccttttaaggcaattaaccgaaagaaatattctttttgttgttgcaagtggtaatcgtatggaacgtttaagacaaatctttgcagaagtctctgacaatattgattatgtcgctgaaaatggagctcttgttattgacaaaggaaacctattggcgcgacaaacaatgcctaaccaccttgttgatgctgttgttgtattttttgctgataaattgagatcttatcgagtgatattgtcgggagttgaggcttcttatgtacttcaagggacttcgtttgaatttggcacagccgctgtttcacaagatgaactgcgacaatttttttctaatcttgtttatttagaagatcttacaaaacgtcctaaagatcctattgtaaaaattactatgatggtagactcagatgatgtcgatgaggtaacacaacagtttaatcaagagttccatggagatttgcgagctgtgtcaagtggttacggagctgttgatatcattcaaagcagtgttcacaaagcatggggcttacaagtcctgatggcaaaatacaaaattaaaccagaagaagttgctgcttttggtgatagtggaaatgataaggaactcttaaacttggctaagtattcttttgcgatggcaaatgcaacacaagatattaaaaatgttgcatgttaccaaattgcatcaaatgctgaagatgcagtgctgacaacgattgaaaaaatactttcaggagaaataaaatgacagattttcaagaactatatcacaaagctgatgtgcaagaatatcgtcagtatattttggctgaccaacaacatcaattgtgggaaaaatacgttgcgctcaataaaactgtttcacatcccaatattgtgtttgcaggcgattccattacagaatattttccaattcatgaactgctgacatcgactgtgccgctgtataatcgtggtgttcatggtattgatagtttacagtttctagagcaccttagtagtcaaatactagatttagcaccgagcaaagtttttctattgattggtgtcaatgatttgaaaaaacgcacaccagaagaggtttgccaaaccattcagagcattattacaaagattcatcaacggttgccagaaacacagattttcttattatctgtttttccgatgaatgaatcgcctgaatttgtacgcacaccaagcttgcgaaataatcaaagtatttcactactaaatgataaccttagtcgattagctggcgataaggtatgttggtttgacgttcatgatttactttgtgatgaaactgggcaactcaaacgtgactggacaggtgatgggcttcatttgacagtagcaggttatcgggtgattgctgacgctattcagccatatttagtgtgatagtatcattttataagatgataatgcaagattacgctttcaaataacaatataatattattgtacttaattgaaagaagggaaacgatagatgacaaaagcatttccaaaaaatttcctttggggcggagcgattgctgccaaccaagccgaaggagcttataacgaagatggtcgcggacttgttgcgactgacgtgacaacaggcggtagtgttaatgcgccacgttacatgacttatattgataaagatggcaagcctggtaaagcgccagcaatgggacacaatggtaaaatcccagaaggtgctaaatatgcggtgcttgataccgaacattatccaaaccatgtagcggttgatttctaccaccgttataaagaagatattaaattatttgctgaaatgggctattcagtctttcgtttgtctatttcttgggcacgtattttcccaaatggtgatgacaaagagcctaaccaagctgggctagatttttaccgttcagtttttgaagaatgccgtaaatacaacattgagcctttggtgtctatttggcattttgacacgccacttgctcttgaagaaaaatatggtggttggaaaaatcgtaaactcattgatttttacgtgcgctattgcgaagtgattttcactgaatacaaagatttggttaaatactggctaactttcaatgaaatcaataatacgaccatgttccttgatatgtttggtgcaaaagcgagcgatgctgattatcaagacggttatcaaattttacaccaccaatttgtagcgtcagctaaagctgtgcaactcggtcatgctatcaatcctgattttatgattggaaatatgatttgtgggattactttctatccaggaacttgtgacccagcagatattttggctaacgaacacaaatgggaatctggcatttattactgtggtgatgttcaagccaaaggaaaatacggcacatatgctaaacgcctttggaaagaacacaatgttgagttagacattacggcagaagacctcgaagatttgaaacgtggtactgttgacatgtacaccttctcatactatatgtcaaacaacgtgacgacacatacaggtgttgaagaagtagcagggaatttctcaactggtgctaaaaacccttacttgacatactctgattggggttgggcacatgacccagtagggcttcaatattaccttgaaaaaatctacgaccgctacgaaattccattgatggttgtcgaaaatggtcttggtgcttttgatacggttgaagaggatggctcaatccacgatgactaccgtattgattaccatcgtgcgcatatcaatgctatggcagacgcgattgacaatggtgttgaccttatcggttacacaacttggggatgtatcgatattgtctcagcaggtactggtgaaatgcgtaaacgctacggctttatctacgttgatatggatgacgctggaaacggtacccttaaccgcacaccaaaagatagcttttattggtacaaagacgttctagcaacaaacggacaaaaagccattgaagaagcaacccaaaatcattaattgatataaaatatgtaaacttcctttaacttccgtcttttggcggaagttttttagttgaaaaaagtcagaaaattgctctaatgtttcttcttttaagattaaagttatgttaaaataatagagaaaattgaaataactttttatggagattattatgaaacaaaaaggtcacggaacaatcaaaaaatcaaaagcctatggtgccattggaaccttgctactatcgggagctttaattgctgctttgggaacaacaaacgttagcgcagatgaaacaagcgtggatacagcagcaactattgaaacagtcgttgagtcatcagctgtccaaggagaatctgacaacgaaaccgttgaagtagaaagtgttgacagcgacaagaccgcaacggttaatgatgaacaagaagtggtttctgaagataaccaagctgacgttcaagaacagacgacaactgatgaaaatgttgagtctgaaacagcaaaagacgtgtcatcagaaagctcacaagccactacagatacaaaagtatctgatactgaagtagcagagcaaacagaagacgaaacaactgatacacaagattctgtccaaactgatgaacaactagcaaccgttgaaagatcagctgacaatgtgactgttgagcgtggagcgactggaaatgcgactaatgaagtcacaagtgtttctttagcaagcaacggctttaacttacaatataatcaagccattgcaagtggtgctaaaatcatgtttgcggtttggtctgacgttaacggtcaagatgacttagtttggtacatcgcagacagcaacggaaaagcaaccgctaaatatacgggctcatacggtaaatacaatgttcacacgtaccaaaatctcaatggaaagatgactgggctgaacggaacaacaattgacgttccaaaaccaagtgctaaggtaagtattacaaaagccagcgccacaacttataaagtgattgtcacagatgtaccagtttatatcactagcgtaaccttgccaacgtggacggaaaacaaaggacaagatgacattatctggtataagacaactaaggattcaacgacaacgtattcagcaactatcagcgttgccgaacacaaccttgaaagtggtaagtacaatgtccacgtttacggaacaagtgcggttaccaattctctaacaggtttgttgggaacaagcttccaaggagactatgcatttggagatgttgcggtgtcagctagtctcggtcaaaaagggattaatattacaataccaagtgacgttagcaaggcaataactgtttatcatgcggtctggtctgctaaaaacgaccaagatgatatcgtctggtataaagttccctctaacggagaattaacagctaaatatactggtgattatggtaaatatcttattcacacatacggtgttgttaacggacgcatgattggattgaataccacaagtatcgatgttgtcaaacctagtgtttctgttgatttgactaaggtcagcgaaacatctgttaaagttactattagcgacgtgccagcttacatgactagtattgtcctaccaacttggactgaaaacaaaggacaagatgatataaaatggtatcaagctactaagcaatcagacggcagctacacttacactttctatgccaaaaatcataactttgaatcagggcattataatgttcatgtttatggaacaagtgccgttaccaattctttcattggcttaacagcgacaagtggtattgatttaacattctcagagaagcttactaatccaaccgtaacagttcaaaatcacaatgctgctaacggaaccttgcaagtggtaattgcagaaacagaaacttctaaagatattgctagcgttgcagtcgctgcatggtcacaagcagagcaaaaaaatattcactggtacacaacttcaagtgttgtcaatggtaaagtagttgtgactgttgatgaaaaatatcatcacaatatttctggcgattatactgttcacgtatatgtcaaaacaacaagcggtgataccgttggttatgccttgggaagttatgcgttaacgaaaacacaatcaacagccaaggcgacaacaagctataaaggtactggtgtttatagtgtgacgatttctggtgtttattcaagtggaacggtgaaatatgctgtttggtctgatacgaatggacaagatgatattaaatggtatgacgctacgacatcaggaacaaccgcaactggtcttatcaatgtagcaaatcattctggtacaggcacatatcatcttcatgcctatcaatctgataatgggcagatgtatttcttgacatcaacagatttcaccgttaagcaaaccaactacaacacaccgtattataatcaacgtgacggacgttgggcaaatacgcgttatggctattacacaatggcttcaactggttgtgtgccaacaagtcttgccatggtcttttcagcattaaccaatactgaagtgctaccaacaacggtagcaagttacctttacaacaatactgttgaatttaaccgaggcacagaaggaacaacaggaaatggtattttggttgcctctcgtcaatggggcttgacaccgactgttattaattcctcagctgcgctaacaagtgctctcaaagaagggcatcatgtggtggcagccgttcaacaagataaattctcaccatggggttatggcactagccatgaaattgttctaaaaggttactcaaatggaaatacttatgtttcagacccatacaattcagccaataatgggtggtatccaattgcttcgctttggaatgaacaaagtacgcaaagtgttgatgttagtggcttaggaaatccatttgtcaaaattacagatatttaatagaagaagctgaaagtaattgtgaaattgctttcagcttttttgattattcatcacagtatcatgatataatagaaataaacttgaatggatagtgaggaataataggacgatgatcaagatgattgccgttgatatggacgggacttttttagacgaaaatgggcgatatgacattgagcgatttgaaaaaatactcgaagaattggaaaaacgtgagattttatttgtcgtggcaactggtaatcagatttcgcggatgcgtcatatttttggtgagcaatcatatagattggcttacgttgtcggcaatggcagtcacgttattgtgaaaaatgagaccaagattttaaaaaatctgagtgagaagcagttggagcatttgtttgcttactatgaacatcattttgatgactatcatattgttgtttcatcgccagagcattcttatatgaccaaaggggctttttcatgcgataacttagcagataaagccagtttggattactataataacagctttccgaatgtgattttacttgataatatgtctgaaatgccacaggaagccattaataagataaccatgaaggttccaatgtcagcagaagaaaaggtaaccaacgattttaggcgtgaatttcctgacttggtgccaatggcaagcggttttggagcgcttgatgttgtcctaccaaatattgataaagcttggggattaaagcaaatcatgacactttttgacattagcccagatgaacttatggcatttggagacggagataacgacctagccatgttgtctttggcttatcattcttatgctatggaaaatgcgacagagcgcgtgaaagaaacagccagatttattgcaccagctaataccaaatcaggcgtttttcaagttatcgaagcgtatttaaaggaaaattaaagtattttaataccaaaattcttgagataataaatcttaagaattttttgaacttatcttttgacaaaaaaagtctcaagatataaaatataaaccgtagataaaagatatccaaagaatggagcatgtgatgacaacaattgtattattaggcggaaatggttatatcggtcggaatgtcactaaaaattggctaaaaaaagattcaagtgctgaattttacgttttatcgcattctggaaaaaatgaattgaaggattcgcgtattaaaaatatagctgttgacgtcacatctgtgggagcagttgaagcagtattgccagaaaaaattgattatattatcgattttattggacgaccagaaaaagatgttgacctatttaaaaaagttaataatttacctgctcaagttatgcttagggttgctgaaaaacatcgtgttaaagcaatgggggttattggtggtgttctcggtccgaaatcgtttgtaaatgggaagaagctgattatcgaatctttggaaaaatcagatattccattagcagtggttgagccaacgattgtctatgagaatggacgagctgatactttagccaaaatggttcctattttgaaagtggtgggtgttttagtaaaaatgctaaaacctgtccatgttgacgatgtcgctaatgagttaataacacaactaatcaagaggtcataatgaaattaaataaaagctttgagcaagcggtttatgtgctaacgatgttagctttacaagaaaatcatacaccagttaaaagtcatgttcttagtgatattttagaagtgtcggattcttatttgaaaaaaatccttgttaaattaacaagagcaggtctcattcaatcaaatgctagtaaagttggtgggtatcagttagcccaatctgtgacaactatcacacttaaagacgtcttttttgctcttgatttacaagctaatgttatcgaattcaaacatatggctcatcacatctatgatgatacaagtcacgtcaaacaagttgagaataaggttcaacaaacattggaaaaaggactttttgcattctatcacgagttggatacattgacaattgctgatttactccaagaagaagcctatgagaatggtgctattaattggagcaataaagtaaaaaataatctcaataaatagctatcctgcagttaaacattctctcttatttctgaaaagcaccgtagggtgtttttttcatatccgacactttctttaaaagttgttgtgttaaaaggcgctaaaaatttctatactaggattatcaacggaaaggagttcttggatatgtcaatcacagaaaaaatgaaaaaattgccgaaaaagttgttgctactcataaaaccattgaaaaaacagttgtcggtgcttacaaagccacagaaactagcgctgtcaatggattcaataaagtttcagacaaattcattgaaaaattctttacaaaagacggtgaaagtgtcgaagaggctaaaaaacgtttagcagcatcagctgaaaaatcaaaagccattaatgagaaagctaaatcacataaacattaaatcatttcgataaggtaaatagaaggaaaaacatgaaaaaatcagattttatcacacttattacctatacagttagcactttagtcttggctcttgggatatgcatgtttacacttcctgattggcacttgcaaaatatcggcttgccagttgctatcgttggtctcctgctcgaagtgatttcttgggtgattcaacgtcgcttggctggcaaaggagctccaaacgtcaatccaaaactagttggaaaagtagtctattccgttgttgctgcgcttgttttcggtggtggttttgccttgattagctcaggaaattttttatcggattcgttttaagtctagttggtctggtactacttatcggtattattccagtggttgtcggtttgaaaaattaagaaaataaaattagctgagacaagtgctcagctaattttttgaatttatttcttggcaaaataacgttttgtttcatggataatgactggtgagagtgccaagagggcaatcaggtttggtaaagccataagtccattaacgatatcagcaataacccaaatcaattctaatttgaggaagccgccgagggcaaccatgacaacgaagatactacgataaagtttgatgtgttttgttccgaaaaggaattcaaaacaacgttcaccgtaataagaccaaccaagaattgtcgtaaaggcaaacaacacaagacagaatgtaagagcaatcgcaccgggcgttccaaagattgatgaaaaggcagcttgtgtcaacggggcaccttcaagaccagaaacagtccattttccagtaacaatgatagaaagcccagtcaaagtacaaatgatgattgtatcaatgaaagtccctgtcattgagataagcccttgttcaacaggttcttctgtcttagcagcggcagcagcgattggagcagaaccaagcccagattcattagagaaaacaccacgagcaatccctttttggatagcgtctttaacgactgctccagcaaaaccaccgactgcagccgtaccagtaaaggcaccagagaaaatttcaccaaatgctggtaggatttgattggcgtgagcaaaaataacagcaagcgtagcaacgatgtaaatgatagccatgaaaggcacgactttttcggctacttttgagatagatttaataccgccaaaaatgatgatagcaacaagaactgcaatgacaacacttacgatttgtggtgccaaaccaaaggaattttcaagcgatgatgtaattgagtttacttgtgagaatgtcccaataccaaagtaagcaaccaaaacaccagcaactgcaaagaaaacagctaaaggtttccaacgtttgcccataccattgaggatgtaatacattggaccaccagaaatttcaccattatcatctttagtacggtatttaatggcaagaagcccttcagaatattttgtcgccattccgaagaaagcagccatccacatccaaaagagtgcgcctggtccaccagctttaatagctgttgccaccccaacgatattccctgtaccgacggtagcggcaagtgcagtagccaaagcagcaaaacttgaaatatctccctgccctttatcatcagcaaagattaatttaaaagctttaggtaatttaatcacttgaagtaagccaaggcggacagttaagtaaacaccagtcccaacgagcaagattaaaagtggtgctccccagacaatatcatcaagtaaagtaaaaaagtctaacataaaaagaaatagtctccccattttaaatatagcgccaaagatgccaatagaaaaagagttatctaaaaagataactcctgaaaagtgataagaagacttagcgagcctaatgctcgcttgtgaatccattcttatcttctgtccttttgcctgagagtttgagttgacaaaggtcaaccttgccccttcggcgcctaatctagataacccaattagcaatcagtaagtaatacaaagtccttaaaaacattactgactctagtggaaattctagctgttatcaaatgatttgataacaaggtctctccagaagtccgtccgtcacccagtcctgtctatgacacctgagagcgtaactccttcggcgaaaggcaagctttcttctcctgaatgacatcattcggtttgctatttaattcgtttactatcttaaagcaaaatccgaactttgtcaatagtattttttgtaatgtttgggaaaaatgttatttttgaaataattaaggaacaatttgcaacaaaatattaataatcttgtcgatgtcagctgaggtgatattggcgtaattaacgataaaattcttgtcagaatgcgtgttttggcaacgataatagcgcgataatggtgtcatctgcagtccatgttttttagccaattggcaaattgtttgttcagataggtcactttgaatatgcaagatgaaatgcaaacccgattcttgctcatgaatgcttattcgtttgtttagcggacttgtcatcaaacgatgaatcaattcatcacgttttttctgataaaagagacgcatacgatttaaatgcttttcaaaatacccctcttgaataaagtaagccaaggtgtattgttccagattagaaacggtattgttgtaaaaacttagcttttcttcaaatgtatctaataattgaggtggaagtatcatgtaacttattcgcagtgtggaagcaaggcttttgctgaaagtgttgatatagatgacttttcctgaactatcaatttcttggaggctcggaatgggcaagccttgaaaacgaaattcactatcataatcatcttcaataatatagcggtcgccttgacttgcccaactaagcaattcgtaacgtttactaatagaaagaatggcaccagtcggaaattgatgagagggcgacaaatgaacaatatcagctgtcgattttttgagttgagcagtatcaagtccgtcattttccataggaatatagataggattaatattaaattgtcggtagatttcggtgattttaggataacttggttcttctagggcaacggttctatccagccccagaagttgaatcaagagcgtgtagaggtattcagtcccagctccaataatgatttgccttgggtcaactgccattccccgataatcatttaaatggttggcaatagcttgccgaagaagtggcacacctttactaggagaaggagtgaccagctcattttgacaattattgaggacttggcggactaattttgaccaagtggcaaagggaaatgtttcagaattcgtctgattattgctaaggtttaaggtcggttttgtctcatctggcatgcttgctggagttgaaactaaccttactgtctttttaactgggggacgatgtggcttaatattggcaacgaaaaagccttttttagcttgactgtaaatgtagccttcagcttttaattgttgatagctggtttcaacggtgacaatggaaatgcccagatgtttagccaaactacgcttagaaggtaatttatcatttgctttcaatgtgccatttgtaatgtctgttttgatagcgcggtaaagttgttcgtaaagcggaatttttccgtgattatccaaagtgtaagtaagcataaatctccaatctgaccttgtaaaaaagttttaaaatggtacttgataccatgtcagtttttattataatgaaaatcaattaaaaagtaaatgaggtatttcttatgacaaatcaacgttatcaactcaacaaacaattggctcaaatgcttaaaggtggggttattatggatgtgacaacaccagaacaagctaaaatcgctgaagctgctggtgcttgtgccgttatggcacttgaaagaattccagctgatattcgagccgcaggcggtgtttctcgcatgagtgacccaaaaatgattaaagaaattcaagaagcggtttctattccagtcatggcaaaagttcgcattgggcattttgttgaagctcagattttagaagctattgagattgattacattgatgaaagtgaggtgctttcaccagcagatgaccgttatcatattgataaaacaagctttgaggtgccttttgtttgtggtgctaaaaatcttggggaagccttacgccgtatttctgaaggcgctagtatgattcgttcaaaaggtgaacctggtacaggcgatgtcattcaagccattcgtcatttgcgccgaatgaatcaagaaattgctcgccttcaatcacttcgtgatgatgaattgtaccatgccgcaaaagagcttcaagtgccatatgaattagtcaaagaagtgcacaaaactggaaaattgccagttgttttatttgctgcaggtggtgtggcgacgccagcagatgcagcgctgatgatgcatctgggtgcagaaggtgtctttgttggttctggcattttcaaatcaggtgacccagaaaaacgtgcgcgtgcgattgtgcaagctgtgacaaattaccaagataaagcattgcttgctaaattatcagaaaatttaggcgaagccatggttgggattaatgaagatgaaattcaacttcttatggctgaacgtgggatttaagggagagatgtatggttttaattggtatattagctttgcaaggtgattttgaagagcattgtcaaaaagtgcgtgctttgggagagcaggcgattgaaattagacaaagagaggatttacaagctcccttagacggtattattttacctggtggcgagtcaactgttcagggaaaattattgcaggatttgaagttgcttaaaccattgcaagacaaaatagcagcaggtttaccagtttttgcaacctgcgcaggtttgattttattagcagagaaaattgaaaatcaacaagaaaattaccttgcgacattgccagtgacggttagacggaacgcttacggcaggcaattaggtagtttctacacagagcttgattttttaggcttgggtcaactgccagcaactttcattcgcgcgccttatatcagcaaggtcagtaaaggggtggacattttggctgaaaaagacggaaaaattgttgcggttcgctatcaaaaccaattgggacttgcttttcacccagaggtcgatagcgataacagtattcatgcttatttcctaaaaatttgccaaacaaagtgaaagcagccaacactattttccaaaaaatggtacaatagataagcattatcttatatgactaattaatctagagaggaataaaactcggataatttgcttatttatttagcgaaatagtgacatccgtggtattttacgatgaatcctttattaaatggtatgaatgacaagcaggcagaggctgttaagacaacggaaggtccgcttttaatcatggcgggagctggttctggtaagacacgtgttttaacgcaccgtattgcttacttaattgatgaaaaatttgtaaatccttggaatatccttgcgattacctttacgaataaagcggcgcgtgaaatgcgtgaacgtgctatggcgttaaatcctgcgacggctgatacgttgattgcaactttccatagcatgtgtgtgcgaattttgcgtcgtgatgctgaccacattggctataatcgcaattttacgattgttgacccaggtgagcagcgcacgctcatgaaacgtattttaaaaaatctgaatctcgaccctaagaaatggaatgaacgtgcgattcttgggacaatttcaaatgccaaaaatgatttgcttgatgaggtagcttatgaaaatcaagcaggtgacatgtacacgcaaattgttgccaaatgttataaggcttatcaagaagaattgcgccgcagcgaagcaatggattttgatgaccttatcatgttaacgcttcgtttgttcgaccaaaatcctgatgtcttggcttattaccaacaacgctaccaatacattcatgtagatgagtatcaagatactaaccatgcgcaatatcaattggtgaaacttttggcgtctcgttttaagaatatctgtgttgttggtgatgctgaccaatccatttatggttggcgtggtgcagatatgcaaaatatccttgattttgaaaaggattatccagaagcaaaagttgttctattggaagaaaattatcgttcaaccaagaaaatcttgcaagcagcaaacgcggtgattaataacaatcgcaatcgtcgtccaaaaaaattgtggacgcaaaatgctgacggtgagcagattgtctattaccgtgcgcgtgatgaacgtgaagaagcagtctttgtcgcttctacgattgacaatattgtccgcgaagaaggcaagaacttcaaggattttgcagttctataccgtaccaatgcgcaatcacgtaccattgaagaagctttgttaaaatcaaacattccttatacaatggttggtggaacaaaattttacagccgtaaggaaattcgtgatgtgatttcatacctcaatgtgattgcaaatactgcggataatatcagttatgaacgtatcgtcaacgaaccaaaacgtggcgttggtcctggtacccttgaaaaaattcgtgattttgccaatatgcaaaacatgagtttgttagatgcgtctgctaatatcatgctttctggcgtaaaaggaaaagcagcacaagcggtttgggatttggcgaatctgctcatgaaacttcgtgatgacttagaccagatgactgttacagaattggtcgaagctgttcttgacaaaactggttaccttgatgcccttcgtgtgcaaaatactcttgaaagccaagcgcgtattgaaaatatcgaagaattcttgactgtaactaagaattttgatgataatcaagaagatgccccagaagatgaatctggtattgacaaactaagtcgtttcttaaatgatttggctttgattgctgatactgatgacggtgatgcggaaactgcggaagtgaccttgatgactttgcacgctgccaaggggttggaatttccaattgttttcttgattggtatggaagaaggcgtctttccactttctcgtgccgccgaggaccaagatgaattagaagaagaacgccgtttggcttacgttgggattacacgtgcagaacaattgctttttgtaaccaatgctaacacacgtactttgtttggtaagacaagctataaccgtccgtcacgttttattcgtgaaattgatgacgaattattgcaataccaaggtttagcgcgtccagctaattcatcatttggtgttcgatatagcaatagtagtgatgagcaattgactttcggacaaggcatgagcttacagcaagctcttcaagcacgtaaagcaaaagttcaaccaacatcaagtcgtggagcgcagccattttcaaaagctggcaaagctgttccagttggtcaatcagctagcgcttcaaaagaagcggtcgattggcaaattggtgacattgctcaccataaaaaatggggtgacggtactgttctagccgttacaggaagcggaaaaacacaagaacttaaaatcaattttccagaagttggacttaaaaaactactagccagcgtcgcaccgattgagaagaaataaacaagtgtaaatcaaaaggaatctgagacaaaactcaggctcctttttagcaagatttttaatcagtattaattgttttgctcggtgttgagaatctaaagataatgactgctacgataagaaatgtaagccaagtgaatgtgatgttccacgaagataagctgctaaataaaacggttcctacaggaagtgacaaggtgaataaaaaagacaagaaattattcgtctgtgctaaggtattagcaggaagtttgcttagtaatagagaattaattttaggattgacttttcccaccagataactcgcgaatgctagtagcagcacatcgaaaattaacggtaggtgaatgaggttagacagaccaacgagaaagaaaataacggcattaatttttagcaactccctaactgattttttagaaaagtaatcgtgtggtgttaagcttcctatcagaataccaccaactaagataaactcaataagaagtagcgcttggctgtaagagaggtgaccgattttggcagtcagtagccaaatattataaatggcattaagtgagccaccaagtatatttaagcaaagaattgacagaagcagctgactaaaatctgctgtactagcttcattgaaaatcagcatcacattatggtataaagctgaaaattgctcttttaatgactgtttttttccattgggcaagacatcataattggcgttatctttgatgagtaataccactagtgctgatagtaaaaatgatagcgcattaatgagtgcgacaagtgaaaagttctgcttagaaaccgttaacaaccagatgcccaaggcttgtccagaaaaactgcagatgtaagagatgaattgtgtaaaggaataggcttcgattaaatcttcttggcgaacgtatttctgaataatgggcatccgcagaccatttgaaaagtcacttagcatatcactaagaatgttaaacagacaaataaaagaaaaagcaagcaaactaggctcattgattatgaaagctaagagtgtaaaaataattgcttgaacgaaacctgtgataacaatccatttctttttagcttgggtttggtcagcttttattccaatccaaatggtaaagagtgtcggaacgaccattgtcacattagcaatactcaccataattttcgaatgaaaaacggtagcagcatagacgacaaaaacaatattgtacaaggaggagccgatagtatttagaaaacgagaaacggtcaaaaggtgataaattttatttttaaaaaataatctcatgattttgtctccttaattgattttgaaacattataatatgattatcttttaaggaaacaaaatgttgaatatattcaagtagctttgattatagtaaagatgaatagttcttaaatttaaccattaacagctaagacaaatataaaaaaaacagtccagtggactgttttttcacgagcccgaaaatgggaaagcgagttaggtccagaggactgttttttgtacttataaatgaatcaaatctctatttgtgaacgttgagcatgaaaataaaatttttctcaaaataagcactttgaatatattcaaaaaatatacctaatcgtcatcgcttttaatagcgtcttgcatgccagaagtgtaatagtcagcagctgaatgacattctaaaatccgtaaaacttggatagcctcttccatttgcttcttaccagcttgctgctgcccttgtttgtagctaaacagcccctttgcccatagataaacaatacgataataagcttcgctttcttggtaaaaatgcttttgaatttgtttgtcgaagtaattagcattgataaaatcattttcatcaatacatagcagaaaaccattgagcaacatgttatgaatgatttttcgattttctttgatttctcctaaaaaatcagtctttcgaaggcattctctagcgtacatggtaaacaaatcaggagttaataaggtagagcaaatagaaagtaatgtcagctcataattgccccaaatttcagtatcaaaaaggtaattataaagaaaagtttcctctttcgctgtcagttcaacactctcatcaaaggctttcaaatgtgctttaacaattagcgcatatatcattcctgtctcttgatcttgctgttttttaagttcactttcatacaatttttgtaaaccagcactatcaaatttttcctcacaagcatagattttctcttgtaattctaccaagtcgctttttaaaaatcctctagtcagataaagaaattcattgatttcaatgtgagtattttcaagtgctataaataatttttgagcagaaaggtcattctttccgctttcaaattttgagagcattgaaggagagaattgcccaccagaggctttagctagtgagatatgtctagcttctcttaattctttgaaggcttgtcctaaatatttcatattttactccaatttaaaagttcttttgtacaaattataccctttttttatcaattgacaacttaaaattatgatcagagtttttcaatctgaactccctaaaactaagtttcctttattttatagattttaatctatttttattacattccaatacagaataaattcctcttgtagtattatttaattatagcttaaaataaaatgatactggttgcattgtgactgatatttcaaaaatgtatatactttttatcaaatgtgaaaaataaatccagatttttttcatatttgataaaaagttaatattcagaatctttatagtaaaattaaaaagtaagcttgcaaaaatcaaaataaggatttggaacaaataaaagcaaaattactaaatgacgctgaaccatttttaagttctgaagagaaaataggatatggggagttaagaattaaatgaaaaagatatacttaccattttgtgtaacaattttaggattagttttgttaatggtgatatttccgttagcacagggaaaaattattttaagttatatcagtattatgctggctgttgggcttcatgaattagggcatttcgtaattggttatgtcaatggtataaaaccactatatcttattattggatttatcaagtttaattttgaaaatggttttcgtattcaaattaatgataactgggtgtattatggtgggatttatcgttataaggtagcaaattatccagaaaagtctgtgctaaagtcgctagttggaggtccattagttagtttacttggttcactcgtcttgttttttcagtcagatttttttacggtatttggctattgtaacttattattatttatagtaacggtaattccgataaatcttgttggtttatgcagtgatggatttaaattatataagttattaacaagagatgatttgtttttgttataccaaagggtgtccaatcaattattacaaatctacgatgaacaagcttttactgaaatttctaaagtatgtagtgttttagagaataaaagggtgcctgattatatattgaattctttcttgttatacctgatttatgcttggttattacaaggagaaatccctaaaattagagaaatttatagcgagttgactcaaagggtaccgagcgataattttaatcgaaattattattatagcttgttagctactttagaagtattactgtataaaaggatgtctagcgacttatttacgaagattaatttgaagaaattagatagaattagccaaaaacgcctacaatacctatcatgtctttacctagaaaataggaaaaagataagtgagaaaagagttgctttccaagagagtttatcatcatatagcgaacaaaactcgattttagttcaagctgaaaagcgatttttaatctaatcattgagagcccacctttttagatgggctcttattatgttatttttctgaaaattattgcgctttcaaggtgaatgtgttatagttaattttataattaaataaagacatttggggtgcgtaaaagctgagattatacccattgaacctgatgcagttagaactgacgaagggaaatgtgtgagtaacaacgtttttttgttgtgcttaaaatcgatagaaaaatactttagtattgcaatactaaagggcttattctgcagtttttcaagataaaaatgactccatttgaagttttcaagtggtgtttttttatgcttgttttaactgagtttttggctgcctatttgtcaggaaaggaagacaaatgacatttaatcgtgttcatcgtttaacggttttagccattatggttgctttagatgtcctgttgacgccactttttcggattgagggaatggcatttatgtctagcgtcgtcaatatcattgcaggaacatttatgacaccgttgtatgcagctgctatggcattgattgttgcggtgattcgtattttgacacaagcaggagtagcaagtgtggcaccgttagccatcttaggagcggttcctggggcggttttagctgcttatttttaccgcttaaccaagaaaccaatcatgtcgtgggtgggggagtttctcggcactggtattattggctcgattctctctgcacccgttatgaactggtattggacaatgacagctaatggtgataatgagctcttggcaaaagcttccgcagcacaatctttatttctttttatgccaagatttatttgtgccacgcttatcggtggtgcgcttggattgactgttgttcatggactgagatactctgcttattttgttaatttagaacatttatatttaaagccaagtaaaaaattaggagaaaaataatgaccagtaaagctaagatgtttgatggttatgctaatgcatatgaccaatggtttatgaaaaatgaaaatgtttttgctagtgaattaaaattactgcatcgcacgcttgaaccgttggaaaagaaaacgatactttcgattggttgtggtagtgggctttttgaatctgccttgaaaagagaatatggcattcatgtccaatatggtgttgaaccgtcaacggatatggcaaaaatcgcccgcaaaagaggaatgactgtttttatcggtgatgctgagacaagcaaattagcggaaaatagctatgatgtgatttatctaaatggttgttcaagttatatcaaaaatttgtcagcagcttatcagaattgtcaccgtgctttgaaaaaaggtgggcatttgattttacttgatgttcctgttgaaagtgcgtatggcattctgtacaaatttgcggcgcatgttgggtcatatgagaaagaattatttgaacaaatcgcaccaactttcccttatccaatcgaacttgtcagctctgccattttccattcaccacttgagaaagaaaatatcttgcgtgaggagctaggaatgacaaatatccgttatttccaaacattgacagcgcagccgatttacacaaatgattttgtggaagaaccaattgaagggtacgacaagggtggttatgtggcgcttgtcgctgaaaaataaatgatgaaaacgataatcttttttgaccttgatggagtgatttttgattcctatggattgtgggataaggctgttgaggactttttgagtacggtgaatttgacttataccacagaaatgaagcagaagttgtggcaattaaatatgctagaggcagaacattatttgagagaactttttggcaagcaagggcaagcttatcaaccagaaattttaaaagcgattttgcttcaattatacgaaacggtcgatattatggaaaatgcgaagtgcgttttagcagctttggttaggcgtggttgcaagctttatgcagtgacttctaattattatgatttggctgaaattggcttgaaatcacagcagttgttgccgtattttacgaccttatattcgtgtttaagtatgggatatgctgataaagagcaggcgttttttcaggaaattctcgaacaagaccgcctgaatgctaatcagattatttatattgaggatagtcttgcaaatctcaaagaagctagaaaacttggtgtgacagggatttatctagcaaattctgataacccacaagctggtcaaaatgacacatttgtaacgattgattcactagatgaattgacaaaaatagtaaaggaaatgaacaatgattgtaaatgaattaaaaaaacgtagtgagatttttattgagaaaattgtagaagatgactttattcagggcatgattacggaaaacctaccagctgaggtaatttgtcattatctgaaagctgattctgtgtatttggataaatttgctgacatttatgcgcagctttttgcaaaagttccagacaaagctagtaaagaatttttcttagggcaaattgattttatttttaaacatgaggtgggggcacatcactttttggctcaagtggtggggcaagattatgaggaaataattgccgatagagcttggtatcctagtgctgaccattatatcaaacacatgtattatcagctaaatcgtgataatcttgtctatattttagctgccatgctgccttgcccatggatttatcagcaggttgccaaacgagtgctggcaagcggcaagatttctgatgataatccgtttaaaaattggcttgatttttacggacaagagggtgtggcagacgcttgtttgacggtttattttgatctagtagcgaaatacagtgaacgcttgtccgcagatgaacaaaaagaagtgattcgtgtgtttttggaaagttgtcagcatgaacgtcaattctttcaaatggcagttgagcaggaagaatggccagaggaggtaagaaatgtctaaattacaagtagcgttaacgattgcaggaactgaccctagtggtggtgcaggaattatggcagatttgaaaagctttcaagcgcgtggggtctatggtatggctgttgttaccagcgttgtggcacaaaatacccaaggtgtgcaagccatttgtaaccttgaccagtcgatacttgatgctcagctaaaaagtgtgttttccgatattcctccgcatgctattaaaacaggtatgttagccgaagtcgaaaccattgaacgtgtcagtcagtatttgaatactattgattgtccttacgttttagaccccgttatggtggcgacgagtggtgaccgtctgattagtttagaagctgtgcaggcgctcaaagaaaaattgctgccgcttgcaaccattatcacgccaaatctaccagaagcagaggtgctttacggaaaagaattaaaagatgaagcagcgattttacaagcaggaaaagctatccaagctggatacggcgtgaaaaacgtcgttatcaagggtggtcatttagaaaatgaagccaacgactttcttttcctagaaaatggtcaagtcgtgacattttcatctgaacgtatccctaccaaacacacacatggaacaggttgtacctatgctgcggtcattactgctgaattagctaaaggacagtcagtagaaaaagctgtgacaactgctaaacatttcattacagaagctatcaagacggcgccagaattgggacacggcaacggaccagttaatcatgtgacctacaaaggagattagatgacttatttagatgatttgagacaaaaccaccctttgacaatctgtttaactaatcaagtagtcaaaaatttcacggctaatgggctgttatcgttaggtgcttcccctgccatgagtgagtatcaggcagatttggaagattttttaccgcaggctaacggtctgttggttaatatcggcacgcttaatgacagaagctggcaattgtacaaggatgccttggatattgcagaaaaacatgatattcccacggttttagaccctgtggctgctggcgcgggtaaatttcgtcaacaagtagcacttgacttgattgaacaccaccgaatttcgcttttgcgaggaaatgctggagaaattgctgcgctaattggtgaaagagtagctagtaagggggttgattctgcacaagttgatgacgttggaaaacttgctttgcgagccaatcagattttgcaactccctatcgttattactggagaaacggacgccattgctgttaatgagaaagttttattattacacaatggtagttcacttatgccattagtgactggaacaggttgtcttttaggtgcagtgttagcagcatttatcgggctggctaaagaaaaggatttattagcttgtttggaagaagcattatcagcttataatatcgcaggtgaattggcagagaagaagcttagcgaaccgttgccaggaagtttccaaattgcatttttagatgctctccatcaggtgacaaacacggacatagagcgattgaaaaaagttgaggtctatcatggataaagaaatcttacaagtttattttatttgtggcacagcaaattgtcctgaaggaaaatttttagagattttggaagccgcttttaaatcaggggtgacgtgttttcaatttcgtgaaaaaggtgctaatgctctaaaaggcgaagaaaaagtggtcttagctagaaaagttaaggaactttgtcgtaaatatcagatacctttgattatcaatgatgatgtggatttagcgctagaacttgatgcggacggcattcacttagggcaagatgatttgccgattaccaaagcgcgccagctttttccaaataaaatcatcggcttgtctgtcggctcgaccatagaataccaacgctcggctgttgaattggttgattatattggcgtaggaccgatttttccaacctcatctaaaaatgatgcaggtgaggtgattggcttaaaaggtttaaatgacgttagagattatgataaagaaattccaatcgtggcgataggtggtattacttttggagatgtggcagccataaaacaatctggtgcagacggtgtggcggttatatctgccattgcacagtccaaacaagtagaagttgacactcaaagacttagcagtttctttgactaggaggggtatagtttaaaactatatctagtcttttttaataaatattagtcaagattaataaaagagtgtaaaatgtatgtacattttaaaaagtttagattggagttgcctatgacacgaaaatacaattttgaaacgttacaattacacgctggtcaaactgttgacccaacaacgaaatcacgtgccgttccgatttatcaaacaacatcttatgtttttgaagatgctcaagaagctgaagatttatttggcttgaaaaaaacagggaatatttattcacgtattggaaatccaactgtggctgtttttgaagatcgtcttgcagctttggaagatggggttggcgctcttgcgactgcatctggtatggcagcaatcacttatactgtccttggtttagcacatgcaggtgaccatgtcgttgcagcaacaacgctttatggtggaacattcaatcttctaaaagaaacattgccacgttatggtatcacaacaacgtttgttgatgttgacaatttggaagaagtcgaagcagctattcaagataatacaaaattggtctttatcgaaacacttggtaatcctttgattaatatcccagatattgaaaaagtggcagatattgcccatgcacataagattcctcttgtggcggataatacttttggcactccatatcttatcaatgtcttttcacatggggtagatatttcagttcattcggcaactaaatttatcggtggacatgggacaaccattgctggtgttattgttgattctggtaaatttgactgggaagcttcaggaaaattccctcaatttgtagatgaggacccttcttatcacaatatcagctacacacgtgacatcggtgcggcagctttcattacagcattacgtgtgcaaattttgcgtgatactggtgcagctctatctccattcaatgctttcttgctcttacaaggacttgaaacgttgtcattgcgcgtcgaacgccacgttgaaaatacgaagaaaattgttgatttcctagaaaatcatccaaaagttgaaaaagtgaattatccaagtttgccatcaagtccgtattatgcgttggcacaaaaatatctgccaaaaggagcaggctcaattttcactttccacgtaaaaggtggtcaagacgaagcacgccaagttattgatcatttggaaattttctctgatttagccaatgtagcagatgcaaaatctcttgttgtccacccagcgacaacaacacaccaacaattgtctgaagaagatttgttagcttgcggtgtcacacgcaaccaaatccgtatttctgtcggacttgaaaatgctgacgatttgattgaagacttacgtttagcattggaaacaatctaaaatagctattcattctatctatgggtaaaagtaaccaacctgtttaacgcaggttggttttctcttaatttcaaaactataattgatgtttatagctatctataaaatattagtatgcctaaatcccttgtttttaggggcagtaagttatatactgtataaacaatttttattaagcactaaggaggcattgtatatggtgagttttaatgaagttctgtcagctgtgaaatcagcaaaattagttaatttatcgcatcagattgatgaaaatagtccacattttccattgttacctaatcttaagaaaaaagatgtttttacgttgaaggacggctttcatgttcaggaattttccgtcgttggacagtacggaacgcacattgatgctccgattcattttgtcgctggcggaaagtggttagatgagattccgctagaagatttacttttaccgctttatgttatcgataaatcagacgctgtcgctgctaatccgaattatgaattgacaaagcaggatattttagcatttgaaaagtatcatgggaaaattcagcctgaaagttttgttgcctttcgtagtgattggtcaaaacgctggccatctcaagaagccttgactaatttggatgagaatggggtgcagcaaacaccaggctggtcaagagaagcgcttgaatttcttattcatgaacgtcgtgtaaaagcaattgggcatgaaacatttgacacggatagcggtcaagctgttgccaatgccggcggaaagctccagcaagaatattatgtgttagaacaaggcatatatcaagttgaggtcttgactaacttggataagttaccaccaacgggtgctctcatttcaattgcttatccaaattggaaagaagcgacaggttcaccagtccgagcaattgcctatgtttttgaaaatgatgttactgactaaacttgtgttttgaaatcatgtgatatgcaccaagatgattaaattcaacggcaagtttagagagaattacaggtcttacaatttccaaacaaatcgttcgttaaaaatagtaaaattggttacaatagggaaaacaatgaattgtggcttgacctttggcaagatagtattttctatttattgagccatggcaaactgctccttttctaatggaggatttacttatgacaacatttcttggaaagcctgtaactttagtcgggcaacaattgcaaattggggaaacagcgccagatttcaccttaacaacaactgatttggcacaaaaaagcttatcagattttgctggtaagaagaaagttatcagcgtcattccgtcaattgatacaggaatctgttcgacacaaactcggacatttaacaaagaattatcagatatggaagataccgttgttattactgtttcagccgatttgccatttgcgcaagcacgttggtgtggcgtagaaggcttggagcgcgcagtgatgatgtccgactactatgacaatacattcggaaaaacctatgggcttttgatgaaagaatggtatctgttagcgcgtgccgtattgattttagatgaggataataagcttgtttacgctgaataccttgaaaacgtcaattccgaaccaaactatcaagccgccattgaagccgtaaaagcactataaatgtcaaaaactcacttaaataactaagtgagttttaactgaagaaaagtcttttttgaatacttcccttaggtggtacggacggcaggttcgacagtccagtggactgtcgaaggaatccaaggaattccatgcctaagttttgagcctgaggtctcaaaacttccgtgcggctgattgtattgatggttcagccactttcaccacagcggtaagtattgtttttgttgggagcaaagcttgcaaaatagtcctaaaattaaatagagacaataattatttatagcttatctaagttaaaagtaagtttgtctgtattctgaactcacttaaataactaagtgagttttcatgttttcaaatcattttttctagtgcggcgacttttaggataatgtctgtgatttcttcggtactttctttgccaccgttggctacccagagcgagatgatgctttcaatgcttgacaaatatacttccaaggcatactggtagggaatatcgtagtaggcagtgattgtctccttgaattcaggaacagtcagaagaaattcatagacaaagtccttgattgtttttggaaaatcaacataagctgattttgaaatggcatagataaattcaaaattttctttaacataggttaatgttctaaaaagaactgcacgtgtgtcggtataaatgctttcatcacttaaaatatgaaataaatcatccagagtatcatttttgaactggtctgccatatcgtatttatcaacatagtgcaggtaaaatgttccgcggtttattcccgcggttcgtgtcaaatcagacactgtgacctcttcaaaattcttctccaacagcaattttgcaagggcttgcttgaggtaattttcagtttcagtgtgacgttttttcataatgagtaaaatccttttattaatttcttaaatgaacagaatgtctatttttgtccttgtttaatcttcgtgcaaattatataataaacctcgaattaaatcaacatgttgttcaaataagactttgaagaggagactatatggcttacattgaaatgaagcattcttataaacgttatcaaactggtgatacagagattattgctaataatgatattaattttgcgattgaaaaaggtgaattggttattattttagggtcgtctggtgcaggaaaatcaactgtccttaatatcttgggcggcatggacaataacgacgagggacaagtgattattgatggtgttgatattgctaattacagtcaaaaggagttgacaacttatcgtcgaaatgatgttggttttgttttccaattttacaatttagttccgaatttaaccgccaaagaaaatgttgaattggcttcggaaatcgttgtagatgctagagatgctgagcaaaccttgattgatgtcgggctaggaaaacgtctgaataatttccctgcgcagctgtctggtggtgaacaacaacgtgtttccattgcgcgtgcagtcgctaaaaatcctaaattattgctgtgtgatgagccgactggagcgctcgattatcaaacaggaaagcaagtgttgaagattttacaagacatgtctcgtcaaaaaggctcaacggttattatcgtgacacacaattctgcccttgcgccaattgctgaccgtgtcatccatatgcacgatgccaaggtgagcagtattgagctaaatgaacacccacaagatattgaaacgttagaatattgaggtggagaagatggcgaaaaagacttattggaaagatatccgaaaatcatttggcagttcaaagggacgttttttatccattatgcttttgatgatgttgggtgcgtttgccttcgttggtttgaaagtaactggacctgacatgcaggcaactgctagccaatatttgaaaaaacataatacaatggacttgtctgtcattgcaagttacggctttagtgatgatgacaaagaagaactagatagtattaaaaatgccgatgttgaatatggttatctgacagatgttaccgttaagaatactgatgatgctattcgtgtattttcaaaaagcacaagcatttctacctacgaacttgtatcaggaaggcttccaaaatcatctgacgaaattgcgcttgcttcaacgatgaaagatgattataaagttggcgatacgattagctttacgcaatcagatgaggatggaattttaaaaaataccacctataaagtcgttggttttgtgaattcatctgaaattttgtcaacgacaagcttgggttcttcgacggctggtgacggttctttgtcaaattatgctgtcgttacagaatcggcttttgacacagatacttacacgattgctcgcattcgttacgacgatttaaaaacgttaaatccattttcagaaagttacaagcaaaaagttgcagataagcaagatgaattagatgatttactctctgataatgctgagcaacgtttggcaagtctaaaatcagatgcacaagcagaagtagatgctaatcaggaaaaggttgatagcgcgaaagcgcaattggctgcgcaggagtcggctcttgctagtttgtctgctgaacaacaagctgccgcacaaagttcaattgaccaagcacaagctgaaattacagagagcgaaagcgaaattcaagaagcgcaagctaaaattgatgccatgacagagccgacttatacgtcatacacacgctcgacattaccagggggagaaggttatcagacttatgaatctagtacgtcaagtattagcagcattgggaatatctttcctgtcgtgctttatgtcgtcgctgcgctggtgacatttaccacaatgacccgttttgttgatgaagaacgcaccaattctggaattctcaaggcgcttggttacagtaattctgacgttattaagaaatttgttatttatggtttcgttgccagcatgattggaactgttcttggaatagttgctgggcactatttgttatcacgtattatcgcacagattgtaaccagtgatacaacgcttggtgagactcatctttatttctattggaactacacagcgattgccctagtcttagccttgattagtgcggttttacctgcttttctcattgccaaaaatgaactaagtgaaaaaccagcacagctgttgctacctaagccacctgtcaaaggttctaaaattttcttggaacgtattggagttatctggcgtcgtttatcattcacgcataaagttactgcgcgcaatatcttccgttacaagcaacgaatgttgatgacgatttttggggttgctggttcggtcgctctgctttttgcaggacttggtattcgctcatccttaggaaatgttatcgaaaatcagttcactaatttaatgccgtatgacatgattgtcgttaaaaacgatgataacagcagtagtgaaaatcaagaagtcaaagatttcatggattcaaataaagtatcgcaataccaaagtatctattttacgactttatcagaaacaatttcaggtttaaccgataaacagaccatatcaattatggtcagcagcggtgatgattttggtgattttattcatttgaaagatgcttcgagtggtgatagtctgaccttatctgatgatggtattatcatatcagaaaaattagcttcgctttatcatgtggaggctggcgatagctttacattgaaagacagtgatggtaaaaagcataccgcgaaagtcgctgcagtagctgaaatgaatgtcgggcattatctctttatgtcacagaaagtttatcaaaagattttcggagaaacacctaatgataatgcttacttggtaacgttgaaaaatgattctagcagtaatattgaaaagctctcaacgaaattacttgccatgtctggtgtttcagctgtcagccaaaattcatcgctagttaaaacggttaaatctgtcgttgcctctttaaatggtgccatgacaatcttaatcgtggtctctatcttgcttgccgtggttattctctacaatttgacgaatatcaatgttgcagagcggattcgtgaactttcaactattaaggttcttggtttctatgataaagaagtgacaatgtacatttatcgtgaaacaatcagcctatccttaattggtatcattgtcggcttaattggcgggaaataccttcaccaagtgattatgggaatgattggttcggatagtattatgtttggcacaaccgtcggttgggatatttacgctataccaattgcagttattgttatcattctattagcattaggctggctcgttaatcatatcctaaaaacagttgatatgctagaagcgttgaaatcagtagattaatactaaacaggcttttgcctgtttttttctttgtaaaatttgtgaataatttattaattctaaagcgtttttatggtataatgacgaatatatgattaaaaatcatatgatgagctgaggactttttaagattgggcgacaaacgtcagataaattgtactcctaatttcttaatgtcctagtggctctgtttatcagaaaggagctgttatggctgagaatcaacaagagcgtatatcgcgcgaacggcggaagatgttgcttagtcgcttgaagtcagaagtcggtccgtataaacgtgatctttatatcgcggcagtcttgtcgtggatacaatttttaatgcgtattctctcatttttcctgattgcgaaaagtgtagagcacttatataaaggtgaggcaatctcactcattactcttatttgccagctattgatactaagtgctatcggttttgctgtatcattgctagctaaaaattatcaaggaacagcttcacaatatgctcgtaatcatttaaaaggagctttttttgaagcgtttcaaaatcatggtggtgagtttgacgacaaggacttttctgttgctgacatcatgaatgtggcatcgcaagggattgacaccttggacacttatttcaaccactacttaacaatttcgttaagagcttactttaactgtgcaacggttctattattagttgcgtttatctatcctattggtggtttgatttttctagtcagcctaccgtttattcctgtgtctattattttgatgcaaaagcgttctaaaaagattatgaaccattattgggcgacttatatggacgttggtaatctttttatggatgatttaaaaggaatgaatactctttacacctatgatgctgacgaacgctatgaaaagacatttgttgaaaaagcggaagaatttcgtcaatcaaccatggaattgttgaagtttcaattgcaatctgttggttatatggacggtgtcatgtacattggtgtcggggtttcaggatttgcagcagccgtttcactatcatacggtcatctttcattgtttagtttgattttcttcgttctcattgcaaccgaattttttgcaccaattcgtgaaatgggctatggtatgcacttggtaatgatgaatactaaaatggctgaccgcatttacacttttttagatagcgcagcggtagatgattctcaagaaaacaaagcatcgctaccaactgatattaaagaaattcgttttgataatgtcagcttttcgtatgacaatactaagattttatcgaacttgtcatttacaattcctaaagggaaaatttttgctgtcgctggtgaaagtggtcgtgggaaaacgactattgcgaaacttcttcaaaaacaattatcggtatcagaaggaaagattttctttgatcaacaagatttagcggatgttaatttggatgctgtcaaagaaagtgtgatgtatgtatcgccagaatcatatctatttaatggaacaatctatgagaatcttgctctagcgacagatatgtctcaagcgcagttgctgacttggttgaatcaacgtcacctcatgactttcttacaagatttaccagaaggattgcaaaccgtggtcggagaaaatggaaatcttttgtcacctggtcaacgccaacaaattatttgtgcccgtgctctccttgccaaacgtcctatctatatttttgatgaaatgacatcaagtattgatagtgaaaacgagcaattgctttatgactacattaaattaactgctcagaatgccattgttttggttatctcacataaaatgaagcaagttttacaagcagagcaagttctttttattgatagcaagcgcaccatttcacttgggcgaccagaagcattattaacaactaatgcggaatttaagaaactcgtgtcaacacaagaagaattggaggcgattttacatggctagtaaagaattatcaacaaaaacacttgttaaacgtcttgcaaatttggttaaaggcttgtggctacaatatgttttagcagttggcggagctgttttgggatttttgatgaccattcttattccaagtttagtcattcgtctagcttggcaagctttagaaggtcagacaccgcacttttcttttgtggttatcttgtttgccttggggctcatgcgggggattttacgctacattgagcacttttttgggcattatgtcgcctttaaaacactttacgattttaggtgcatggtttttgcaaaactacgtcgtttagcaccaacaaaattggatcaacaagatagcggaaacatgctaaaaatgattggtgaagatattgaagcaatggaagttttctttgctcacacccttccaccagtaatgacagccagtctagtaacgattattttagcggtttattactggtcagtttcacctgtgattgctgtgattagtttattggtttatgcgattttagcgattttcctaccacgagcacaagcacgacagttacaaccattattgcagaaacagtcacaaacacgcaaagcttatatgtctcatttttcggacagtttgcatggcatgaaagaattgctgcagtttgggcaaattaaatcagacttggaacacttaaataaagaaagcgaatcggttaatgcgcgtgaaaaagaggtggcacaagcacagcacctgcaagtaactctatcatttctagtaattggattagctatcatgctagtagcagttttgactatctcacaagcaaaccaaggacaaatttctcttgtttctgcaacaacaattattgttgtcttttcaacgtcatttgcgccatatttggaattgagtcgcctgccacttggctttaaacgggcgatgacagcagctcgtcaagtttttgaattattagatgagaaagaatttgataaatcaggtcaaacctttgatgaaacaatagatagtattgtcttggaagatgtttcgtttgcgtatgagaatcgtaatcaaagcatttttaatcacctgtcagttgcctttgaaaatcataaaatcattggtttagttggacaatctggttctggaaaatccactctgatgaagcttgtcatgagatggtatgataatactaaaggacaaattttagtaaatcataagccactgtcaactctggcagcacgtgatattcaaaatcgtattgcctatattccacaaattcctcaagtattcagccaaagtattcgtgagaatttgacgcttggcaatccagatattacagatgacatgattttagaagcggcagcaaaatgtcgcattaaagacaagattttgtcaactaagaatgggttagatacgctcttaaacagcgagcaaacgctattttcagcaggtgaattacaacgtttagagttgacacgagctttactaaaagatgctgattgttacatttttgatgaaccaacaagtaacctcgattcacttaacgaggcagcatttttacaagttgttcgtgaacattgtaaaggttatgttttccttatttctcatcgtttgagtacagtagcagctagcgatgttatttacaaagttgaaaatgaaaccttgacccagatatagcatatgaatatatgttggtattttaatactaaatttaaaaattctgtcttaaaacgagacagcttatatagattggagttattttgaaaactaaagatattattacaacaggaatttatacagcactttattttgtttttttatgtttaggaacattattatctgttctattggcgtatagtgcaaatatgaaatatgcgccagctttcattgctttgttggcaggaacagtttatatgctcttaattgctaaaacaaagaaatttggttgtttaatactaatgtcagctgttatttccgttttcttctttatgtcaggacatttcgccttttcgttccttccaaatttgatttgcggtattttagcggatatcattgcaaaatttggtaaatatgaaaataaactttacaatttgatctcttacattgtcttttcattcggaaacttaggtcctgtcattatgatgtgggttgttcgagatgcttatattgaacatttggttgcgattggaaaagacacaagttatatcaatgaagtaatggttaatttcgatttttcaaacgttgcttggctttctttaactatcattatcggtggtttacttggcggtttattcggacaatatatgcttaaaaaacactttaataaagctggtatggtagagtaatgaatacagttactattgatgttcgcactaaaataatcttactcttttttaccaatattttattgctgcttcatatttctgacggttacgaatgccttttaatgattggcttaggagtattgttttttcttgaaggtgatcgaaaaagagcgctatattatgtcattccgttcttagcactgattattttagaagattatctattatcgccagagtatgtgacgtcttatattgctttgtttctagttggtgggcgtagatttttaccttgttttatgattggtggtagtattttaaagggttcggtgcatgaattcatcgtcactatgcgtacatggcacatgccagaaggccttttaattgctattgccgtcatgatgcgctttttaccaacgataaaagagcattaccgaatgatttgcgatagcctaaaaatcagaggaatttttacgagtcgttggatgattattcgtcatccgctgatgttttttgaatatattttagtgcctttgctgatgaatgctactcgtattgcacaagatttgacaatcgctagtatgacaaaaggtgtcgctagtaaaaaaagaaagacttcttatgtgacttatcgatttggcttagttgattatattgcttatggctttatggttattttcgtattagctcttataacgggggtgacattgtgatgatttccgttaaaaatcttaaattcacttatttgaacagtaagaaattaagtctgaaaatcgattctctccaagttgctaagggggaatgtttggtgctctgtggaaaaagcggtagtggtaagacaacctttgcaaggttattgaatggtttagtacccgaatactatcaagggaaattagaaggtgacattcaagttgttggcatgcaaccagggcaaaattctgtcgaagaaatgtcgcaaaaaatcgcctctgtatttcaaaatcctgccacacaatttttccaccgcaaagttgaacacgagctagtttttccttgtgaaaaccaagggattgctcaagctgacatccaaagtcgtctaaagcaaacaaccgagttatttaatcttgaacagttgttgaattatgatttactaaacgcttcaggtggggagcagcagcgtgttgccattgcgacagctaacatgcaaaatcctcaacttttgatactagatgagccgagtgccaatttagaccaaacaagcgtcgaaaggttaaaatcacatcttaaagctttaaaagcactcggagtgacgattgtgatagccgagcaccgtctagatttcttaaaagatttaggtgatacctatctgtactttgaaaatggtgaggtgactcatacttggtcacgtaaggagtggctacccctaagcgaagataagcgtcatcagcttggtttacgtggtggcaaaaatctttcttttgcgagtcaaacattaccagaaacgcctgctcaagatagccttcaggtacacgagcttacgctgacagcagggaaaaaatctttgggggctataagtcatttagcttttccagctgggaaaataatagctattcttgggcaaaatggtcttggaaaatcaagttttgcaaagcttctttctggtttaaataagtcaaatggcattatttctcttgcaggacgttccctttcagaaaaagaacgtcttaaagagacagcttacgttatgcaagaaatttcccttcaactcttttcagatagtgttaaaaaagagttgcttcttggcaatcagcagaaaaagaattatcaaaaaattgctgataatttaggtttacaagacttgttacaacgtcatccgctatctttatcaggtggtgaacaacaacgtgttcttatcggaaatgctttgctatcagataagaaaattttcatctttgatgagccaacaagcggtcttgattacgagcatatgttagctgttgggaaacttttgcaagagttaaaagcagcaggaaaaatcgttcttgttatcacacacgatgaagaattagtcacgactgtttgtgactatcaactagattttgcaaaatatatttcgaatgaataagatagtggcaaataaagtcactaacagagacttgaagtcaatggttttgtagaaaaagattcctctgcaaatcattatttcttgttgttaagctaatgaaaaacggtctagggatagaccgttttacttgtcaaaaaatagttttagtattataatactaaaatataaaggagatagctatgaacgaacttgttgaaaattacaaatcaaataagattgctaagattcctttaaaggagattacagaacattttaaaggtaaggcagtttcaaaattaggcgatagtggcaatatttctgtgattaatttaagtgacatggacgatacgggaattgactatgcacacttaaagaaaattgattgtgatgaaaaaagtgtctcacattatctgttgcaagaaggagatgtgttaattgcttctaaaggtacagtgaaaaaaattgctgtttttgctgaacaagacggaccagtaattgcttcggctaacattactgttttacgtcctaccagcgatatttcaggtggttatatcagactgtttttggcatctgatttaggacaagcactactagatgagacaaatactggtaagaatgtgatgaatttaaacactcaaaaaattattagtattgaaataccaaagattccttcgattcgccaagcttacttaattcaaggatacgaacaaggtttgaaagactataaacgtaaactaaaaagagcaaaacaagaatggcaacgtattcgtagcgaggttgaaaaaaacttattttaatatagggataagtaaaagaagctaattgagcttcttttttgctataatggtaataattagaaaattcaagtgaggaatttatgaataatattaaatgcccgcattgcggaactgtttttacaatcaatgagacagagtatagtcagcttttagcacaagtccgtagcaatgaatttgataaagaaatccacgaccgtcttgaaaaagaaaaggctttgctagaagaaaaatcaaaaaatgatttgcaaacgcaagctagcgcgaaagataaagaaatcagcgatctaaccacgcagctagaacagctaaaacagacactagccttagaaaaccaacgccttttaagtcaaaaagagcaagaaatcacagaacttaaagcacaattagaaaatttatcttccgtaaaagagctagaactaagtcaagcgttatctaagaaagataaggaattggttgaggttcaaaatcaactggaacgtttatcgcttgaaaacaaaaacagtctagttgaagccgttgcggctgttgaaaaagaacgtgatgatgccaaatcaaaactagctcttcaagaaaaagaggcagaattatccttagcttctgtcaagagtgactatgaagcgcaactaaaagcggctaatgagcaggtggaattttacaaaaatttcaaagcgcaacaatctacaaaagctatcggagaaagtttagaagtctatgctgaaacggagtttaacaaggttcgtgcttacgcttttccaaatgccactttcggtaaagacaatgaagtatcaagtcgtggttcaaaaggggacttcatttatcgtgaaacggacgaaaatggtattgaaatactatccatcatgtttgagatgaaaaatgaagctgatgaaacaaaaacgaagcacaaaaatagagatttctataaagaattagacaaagaccgtcgcgagaaaaattgtgagtatgccgttttagtaaccatgctagaagcagacaatgattacttcaatactggtattgttgacgttagtcatgagtatgaaaaaatgtacgttgtccgtccgcaactattcattcaattgattggtattttgcgaaatgctgcgctcaactcactcaaatacaagcaagagttagctttggtacgtgaacaaaatattgacatcacacactttgaagatgaccttgaaaccttcaaaaacgcttttgctaagaactatacttcagcaagtaataacttcaaaaaagccattgatgaaattgataaatcaatccgccgcatggaagaagtcaagcgctttttgacaactagtgaaaatcagctccgccttgctaacaataaattagacgatgtttccgttaaaaaattaacacgaaaaaatccaaccatgcgtgccaaatttgaagcgttaaaagaagaataggacctttcaatgtggtgttgtttcttttcctaaaatgtgtgaggactgaaaatgattattagaccggctcaactattagatattgaaaagttatcccctctttatgctgaacttggctatcctgtcaaggaagctgaattggttagacgattaaaaacagttctttctcatcctgattaccatcttttagtcgcggttgatgacaatgaaatcattgggatgattggttatgctaaaatgttattttttgaaaatgaaggtgcctactatcgtattcttattctggcagtattacaaaactatcgccgtaagggtgttgcgacagccttgatagatgctgtcaaaaatcgtgcactatctgaaaatattcacgctttagcgctaaatagtggggatactttagaacgacaaatagctcatcgtttttatgaaaattatggtttcaagcaagctagtcgtggttattctctctatctaaaataatgttaattgttaatagtttcaaaatcattgtcacttttctgatgtgttataataaagctatcaaatattgaggtaattattatgaacaatattatagatttatcaaaaccagtcgctgagacgattaaggaacacccagaagtgaaggagattttggtagatttggggtttaagccattgtcaaaacctgccatgctaaacacagttgggaaagtaacgtctctaaaagctggtgcaaagttagctaatatttcacttgaaaaagttcaacgaacacttgaatttaatggttatgaagtgattggaggcagttatgactgaaaatcgtattgaaatactaaaagatattctgttacgtttgcatcatggtgctgatgctaagtctgttcaagaggattttgaccagcattttacaggtgtgtcagccttggaaatctcaatgatggaacatgagctaatggggactgatactggcattacttttgaggatgtcatgagcttgtgtaatgttcatgctaatctttttaaaggtgctatctcagatgttgatgtgccagatgcggagcaagaagggcatccagtctatgtttttaaacaagaaaatcttgctttacgtgctgccatgttacgcattcgtcgtattatcgaaaattatgaaaaggctgaaaacgaggaatttcgtccagatttaattcgtggattgaagcatcagatgagtcttttagggcaattccagaatcattataatcgtaaagaaaacctctttttcccagtgatggaacgatatgggcacgatgcaccgccaaaagtcatgtggggtgttgatgataacattagagcactttttgaaaaagcgcaaactgctgtggagcagttacctgacctaacaatcgaggaagtttcttcagcctttgaagcattcgcaaaagaattcgaagaaatgattttcaaggaagaagctattctcttgatgattttattggaaacattgactcaagatgattggcttgcgattgccgaagaaagtgatgcttatggttatgcaattgttaaaccaacagctaaatggcagcctcatcgtgaaaattttgaggatacaaaacaagaccttgcgcattcgacaaaccaaacagaagatagtcaagaaaattcaacaactgataatcaattgattaaagtcattgatacgccagaagggcagttcactattagctttacacctaaaaaggaaagtcaaagttttgaccgtacgagtcaacaaccatttggtaacggttacctatccgttgagcaagctaatcttattctcaatcgtttaccattagaaatcacttttgtcaataaagatgatattttccaatattacaacgatagtaaagcaccagatgaaatgatttttaaacggacaccaagtcagattggacgccatgttgagctttgtcatccaccaaaagttttagataaagtcaagaaaatttttacgcttttgcgctctggtgaacgagataaagttgtgatgtggttcaagtcagaaaaactcggtaaatttgttcatgtcacctacgctgctgttcgtgatgaaaatggtgaatttcaaggcgtcttagaatacgttcaagaaattcaagatttctttgagttagatagcgataacaatcgcgacatttaaacagaatagataagaatatagctaaaactctcataatggtgttttagcttgtcttttgttagtaaaaaaagttataataaaggttatgattaacggaattattaatttaaaaaaagaagcaggaatgacgagtcacgacgcagtctttaagcttcgaaaaatattgcatgaaaagaaaattggtcacggaggaacgctagaccctgacgttgttggagttctgccaattgctgttggtaaagcaacacgtgtgattgaatacatgacagaagctggcaagatttatcgtgggcagatttgtctagggtattcgacaacaacggaagatgctagtggtgaacgtcttgagacaacgccagttagtgatgtagcagcagaagaagttgacttggctttgagaagttttatcggcgaaatcactcaaattcctcctatgtactcagcagttaaagtcaacggcaaacgattatatgaatatgctcgcgctggtcaaacagttgagcgacctgaacgccatgtgacaatctatgatttcaaacgcactagcccgttagaatttaaagatgattgttgttattttgattttgaagtggcttgtagtaaaggaacttatattcgtacgttgtcagttgatttaggaaaaaaacttggctacgctagtcatatgtcgtatttggaacgcgaagcttcagctggtttacgactagaaaacgccttaactttggcagaaatcgctgacaaagtagctttggaagatttttcatttcttcttcctgtcgaatacggcgttatggatttaccacgtgttgatttgaccgaagaccaaaaaatagagatttcttttggacgaaaaattgctttagatagaaaagatgaacaacttgcgggattttatgaggataagttggtggcaattcttgagccgcgagatgacctttacaaaccgcataaagtatttatctgatttagaatggaaaaaatggaaattcaacgaataaaagattacaaagacataacaaatgccaaagatagtgtgttagtattaggatactttgatgggcttcatcgaggacacaaggcattatttgataaagcaaaagagattgctaaacgtgataatttagcactaactgtcctaacgtttaatgagtctccacgtcttgctctatcacgttttacgtctgatttattgcttagtttaacctcgcctgaaaagcgctatgagaagtttgcggaatatggtgttgattatctgtatttgattgattttacgtcaactttttcaaaactctctgcaaaaaactttttagaaaactacatcaaacagttgcgtgctaagacaattgttgtcggatttgattataaattcggacacgaccgtaaagatgctattgatttggcacagcaattcaacggtgaggttgtcgttgtgccagaagttcaagataatggtgaaaaaattagttcaacacgaattcgtcagttgatttttgatggcaatattaaagaagttaatcgtttattaggttacaattttagcacgcgtggtattgtcgtacatggtgatgcgcgtgggcgaactattggttttccaacggctaatctagcgccgattgataacgtttttctacctggagacggcgtttatgtttccgatgttattgtcaacggaaaatcttatcgcgccatgacaagtgttggcaaaaatgtcacctttggtggtactgaattacgtctggaggccaatatttttgatttcaaagatgagatttatggtgagacagttgaaataatctggttagataaaatccgcgatatggtaaaatttgcaggcgctgatgaattgattgaacaattgaaatctgataaggaagttgctgcaaattggaaaaaagatagccaagttccttaaaattttgtataataaaagcaacagtatgggagaggtggttatatgattactttatttttgtcaccaagttgtacgagctgccgaaaagctcgcgcttggttaaacgaacacgacgtgaaatttcaagagcataatattatcaccagtcctctcagtcgtgaagaattaatgtcgattttggcatttactgagaatggaacagaagatattatttcaacacgttctaaagttttccaaaaattagatgttgatgttgatgaattatctgtttcaaacttgattgatttgatttcaaaaaatccaggattattgcgtcgtccgattattttagataacaagcgaatgcaaatcggatttaacgaagacgagattcgtgcctttctgccacgagattatcgtaaacaagaattgcgtcaagcaaccataaaagcagaaattgaaggatagaaaggaataactcaaactaatttctgatgattttgctagactagtgcactgcaaagttgttagaaagcaaaaagtgagattgctttttgttagtttaataacttgatgattcaagttatttgagagtttttggtatcttaagatgaaaaattacagctatcctcttgatttgtcttggagcactgaagaaattgcctcagtgcttcattttttgaatcaagttgaagccgcttatgaaacaaaggtttctgtaaaagatatcttggacagctatgctatttttaaaaccattgtgaagagtaaggcgcaagaaaaacaaattgatcgtgaatttgaaagaaacagtggttattcaacttatcaagctgtaaaagccgcaaaagctaaggagaaaggatatatttctcttggaaaataagtttacatttgctaaagcgttaattcatgctgcgggggattttatcaaagataatatggttcaggacctgcagattgaagaaaaaacgcgttttgatgatttggtgacgaatcttgataaggcaactcaggaattattaattactaagattaagcaagcttatcctaatgacaatattatggctgaagaaaataatattcatcatcctatttcagacggcaatgtttgggtattagatccgattgacggtacggtcaattttgttgttcaaggggctaattttgcggtaatgattgcttattacgaaaatggcaaagggcagtttggtttgatttatgatgttgctaacgacatcttgtatagcggtggtggacaatttgacgtttatgccaatgacaaacaacttacaccttaccaagatgtggcgcttaaacgaactttaatcggttgcaatgctagtatgttttcatgcaattattgtggaattcgtgaccttattgaccagacattaggtgttcgtgtttatggcggagctggtcttagtatggcgtatgttatgacagggcaattgttagcttatttctcatatattcaaccatgggattatgctgcggcaaaaatcatgggagagaaattaggctatgttttgttaacacttgacggaaaagagccagattttgcaacacgccagaaagtgatgtttgttcctaagcagaaactatcaacgattcaaacttatttggattgatacagaaaggattgtcaatgattgacggaaaatgccgcgcatggtacgaaggtgaccatattttagaagaataccatgataacgaatggtgtaaggtggcacatgacgaccaatttcaatttgagatgctgtgcctagaaggggcaagtgttggtttgtcatggaaaacaatcatgcacaaacgtgaaaactatcgccgtgcttttcatgatttcgacattgacacctgtgctaaaatgtcagatgatgaattggaacaattattgtcaaattcgggcttgattcgcaaccgaaataagatttttagtgttcgaaagaacgctcgaattgtgcaagaaattcaaaaagaattcggctcttttgatgcctatctttggggttttacagacggcaagcagattgataataagtggaaaacgccagaagatgtgccgacgctgtctgatttatcagagagactaagcaaagacatgaaaaaacgtggcattggatttgtcggacccgttattacctactcattcctacaagccgttggtattgttaacgaccatctcgttaattgtgattatcgatagtataacctagtgaaatcactaggtttttttggtactttttgctacaatgaaataaattcacagaaatgattttgatgagataaataattattaattttaaaaggagactttttatgatagattggctgatgacacaaaacgttgttttgttagccttgttagcaggattgtttacatggggatgtaccattcttggttctgctgttgttttcttctttacaaaagttagtcgtaagttgcttgatgtgatgatgggatttgcggctggagttatgattgcggcttctttttggtccttgttggcgccagctattgattacgcacacgcagactatggtaaacttgcttggttaccagcagcggttggttttctgttgggtggttttagtttacgcttaattgacgccctggttccacatttgcatttgggaaaagatgtttcggaggcagaagggattcaaccaaagaaaaaattatctaaaacagctttgctttttttagctattacgattcataattttccagaaggtttagctgttggtgttacttttggagcgctagcgtctggcaacatgacgaatgcggctcttatcggagcaattggacttgcgattggtattgggctacaaaatatccctgagggggcggcgctttccattcccattcgtgctgacggcagttcacgttggcgtgctttctttatgggagcgatgtctgcgattgtagagcctatcggtgctgttttaggagcagctcttgttattgtcatgctacaaatcatcccatatgctcttgcctttgcggctggtgccatgattttcgtcgttgtcgaagaacttattccagagtcgcaaaccaacggcaataccgatattgccacacttggacttatggttggttttgtcattatgatggtgatggacgtcgctttgggataatgtagtcgtggaatgctaagcttattttgattacccctagcggacattcactagggcttgctggttttgtgcatatcatttagaaatgttttcaaaatgtaataaaataaagaaaagactagaaaaggtgattttatggcgattacagttaatttgtattacaagggtactaatggcaatgctaaaaaattcatggaagaaatggaaaaatcaggtacggcagcagcaattcgagctgaaaaaggaaatttgagatatgattatttctttccagcaaatgaccctgaaacggttttgttaattgacagttgggaaaatcaggaagccattgacgtgcatcatgcttcaccaatgatggacactctagctgaacttcgagaaaaatacgacttacacatgaccgtagaacgttatgtgtctgatgatagcgaagttgatagtgaatttatccgaaaataatgccatgcgataagaggattgggcaaaatcaatcctctttttgattttcgaatcagaaagttgagaaatttattcgtatgagatatgataagggtaatatttttggaggtattgttatgacaacatttgcagattattttacacctatttcagccaaggaggctaatgcacaacttcaaactgcggacaattttattctttttatcggacgtccgacttgtccatattgtcgccgttttgagccaaaactaacgcaagtggcgaaagataatcaattaactgttcatttcttaaatagtgaaaatcaagattcagacacgcaagagcttcgcacaacttatgatgttccaacagttccagggcttttggtagccaaatcaggtcatgtgaaagttgtctgcgattcatccttatcagaagaagctattttagattttataacgcattgattaggagactgtatggaagtaaaacaatatgattacattgttatcggtggtggctctggcggaattgcttcagctaatcgtgccgctatgcacggcgcaaaagtcattctttttgaagcaaaggaagtcggtggaacttgtgtcaatctaggatgtgttcctaaaaaagtcatgtggtacggcgcacaggtagctgaaacgctaaacacctacgctagtgaatacggttttcaagttggtcaaacttcttttgattttaaaactctgaaagccaatcgtgaagcctatattgaccgtattcatgcttcttacgaacgcggttttgataataatggtgttgaacgtgtctatgattatgcgaccttcgttgatgcacatactgtggaagtggcaggaacgtattacacagcgccgcatattttaattgctactggtggtcatgcgctttatcccgatattcctggggcgcaatacggtatcacatcggacggctttttcgagttagatgaagtgccaaaacgtactgcggtagtcggtgcagggtatattgccgtggaagtagctggtgtcttgcacgcactcggttcagaaacgcatctttttgttcgccgtgagcgtcctctacgaacttttgataaggaaatcattgatactttggtggatgctatggctgaaaatggtccaacgttgcacactttttcgattcctaaagaagttatcaagaatgatgatgatagtttgacattggttctggaaaatggtgagacttatacagttgacacgcttatttgggcaattggtcgtaaggcaaatgttactggttttggtcttgaaaagacgggtgtagaacttgatgataaaggatttatcaaaactgatgactacgaaaacacatcagttgacggcatttacgctcttggtgatgtcaatggtaaattggaattaacaccagtcgctgtcaaggcaggtcgtcagctgtcagagcgtcttttcaatgacaaaccaaatgctaaaatggattataaagatgtagcgactgttatttttagtcacccagcaattggttcaatcggctattcagaagaaaaagccattgcagagtttggcgaagaacaaatcaaaatctatcgctcaagtttcacaccaatgtacacagctttaggcagtcatcgtcaaccaagtaagatgaagctagttactcttggaaaagatgaaaaaatcattggcttgcatggaatcggctatggcgttgatgaaatgattcaaggcttctcagttgctatcaaaatgggcgctaccaaggaagattttgataatacggtagccattcacccaacaggagcagaagaatttgtgacgatgagatagttttgatgcaggaaagtattgtaataccatgattagagcttgagacgtaattgtttcaagctttttagtatgttaatgattggcatgtaattccttttatgcaattttgaaattaaaattaaatcgttatgtcatcaaattagaaacaaagatttgttagaattcacctaaataagggagcacatttcaaaatgtatttgggaggattatgatgaaaggaaatcattaccgaaattttatcgtcactttggtgattgggattatttttttagctggcggtgtagtgactgctattgttaattacagaaataatactgtcacagctttatcggcaaaaaatcaagtttttaatggtgaaaacacatccgcagacaatggggcaatggttgtggttaatgtgtatggcatttatgaagaaccaattgcggatattgacggacacaacacggttatttggttgattgcctatgataatggttatgttggagtggaggcaaaagaagatgatcagcaaattgcggctctgatttcaaaagggagtgatttgagtcagcacccacaacaattgatggttaagtattttgatactaattataataactccaatggcattaccagttattcaagtgccatggaaacgattgtcgagccaacgactgatttaggggagcggtttagttatagttcttacttgtcgttatcagctgcaaatagtgataaacaagtcaattatattgtcgcggttattattggtggaatcggagtatttttaattgttctaagttttgtaaccaaagcaaaaacgactaaagctttcagcgagttttatgcagaatatccagagctaaatggttcgattgaacatttgcaagatatagcaggatattctaacgataaattaaaacttactatttatagacaccatttggtttcttactatggtgcctttgctatcatggatttaaatgatattcaacaactttatcattatgtcattaaaatcaaacggacttttattacaattggacgaaattcaatgcttatcggtattacaaaaaataaaaagcagaaaagcatttcaattaaaaatattggaaaaacgactgacagcgaacttcaaccgatgttcgaatatgttgcacagcatttcccagaaatcaaattgggcaaggattagtttttcacaacttaatcaagttatacgatagtagattaatactaaataagacagcaaagctaaggcaataaaccttagcttttttattttaaaaagccgcgcgatagttgtaatcggtatgtgaaattgttatcatataagtatgttattacctgaaaaatttattgaaaaataccgtaatattcttggagatgaagcagatgattttctagcgacatttgaccaagaagctatctcaggatttcgtgtgaatcctctaaaaaatgttcaacagacatttgataccccaattcctaacacaccatgggggtattatggcaaggtttctggcaagtctccagaacatgtttcagggcttgtttattcgcaggaaccagcagcacaaatggttgctcaagtcgcagcaccacaggaaaatatgcgcgtgcttgatttagcagcagcaccaggtggcaaatcgacgcatttgcttagctatatgaataatactggcgtcttagtcagtaatgaaatttctagcaagcgtagtaaagttctcgtagaaaatattgaacgttttggggctcgaaatgtcgttgttaccaatgaaagttcacaaaaacttgccaaagtattcaaatactattttgaccttatcgtttttgacggaccgtgttcaggtgagggaatgtttcgtaaagaccctgcagccacgcaatattggcatgaggattatcctgcagaatgtgctgcgcttcaaaaagaaattttagaagaaaccatgaaaatgttagccattggtggaacgcttgtttattcaacatgcacttggtcgccagaagaaaacgaaggagtggttaagtggcttttagacaagtatgattatctggaacttgttgatattgaaaaaataaatggcatggtggaagggatagatttgccacaagttgcgcgcatgtacccacatcattttaaaggagaagggcaatttgttgcaaaactacgtgatacaagaacagcagaaacacgttctgttaagcctgtaaaatctaaccttaccaaggctcaattaaaactttggcaagatttcgcaaagcaacacatcaaagttgatttagcaggaatcttacaaacttttggagataatctttatctattgccagaaggtttgccagacttaggaaaactaaaaatcgcacgtaatgggcttcatttgggaacctttaagaaaaatcgctttgaaccttcgtttgctttgggtctttcattatcacctgatgacgtagaacagttcgtgaaaattgatatagaacagttcaaggtttatgcatctggaaatattgtcaaattggaagagccaattcaaaacggctggtatctggtgtcgataaatggcaatggcataggctttgccaaaattactggaaatattctgaaaaattacttccctaagggactgcgtttttattcgtaaactgttacagatacaatttatgttaaataggaagaaaagcactttgcaaatggctgcttgatatgttactatttctttgtgaggtatttgtaacacttcatgtaaattactttttattttcaagattaagtaggaatcacaaatgaaaaaaatgaaaaaacttagctttttactgctaattacctcagtttctatcattttgtcaggttgtgctagttggattgataaaggtcaatcaattaccagcgttggttcaacagcgcttcagccccttgttgaagctgcagctgatgaatttggaacagccaatattggaaaaacagtcaatgttcaaggtggaggatctggtacaggactttctcaagttcaatcaggagcagtccaaattgggaatagtgatgtttttgctgaagaaaaagacggtatcgatgctgaccaattggttgatcatcaagtagcagtagctggacttgctgttattattaacgataatgtcaaagttgataatttaacgacagaacaacttcgaaagatttttacaggtgaaattacaaactggaaagaagttggcggtcaagatttggaaatttcaattattaaccgagcagcaagctcaggatcacgtgcaacattcgatagtgttattatgaatggtgagtcagccgtacaaagccaagagcaggattcaaatggtatggtgaaatctatcgtatcacagactccaggtgcgatttcatatcttgcttttgcctatgttgatgattctgtgaaaacaatcagtctaaatggttatgaaccaactgctgaaaatgtaacaacaaataattggccactttggtcatatgaacatatgtacactaaaggtgagccaacaggcttgacaaaagaatttttagattatgtcatgagtgatgaagttcaaaaaggcattgttgaacaaatgggttatatttcagtcaatgatatgcaagttactaagtcagctgatggcacagtaactgaaaaataaggagacgttatgagaaatcaagaacttgagaaacaattaacctcaccttcaaaaaattctcgattagaaaaattcgggaaagggttaacccttttctgtttggtactaattgtttttatcgttgcaatgattttaattttcgttgcgcaaaaaggattgtctaccttctttgttgatggtgtcaacccgctaacattcctttttggaagtaaatgggatccaagttcaggctcttttggagctctaccaatgattttggggtcatttattgtaactattctatctgctttaattgcgactccgattgctatcggagcagcggtatttatgacagaagtatcaccaaaatacggtgctaagattttgcaaccagctatcgaattattgacaggaatcccttctgttgtttatggttttattggtctgcaagttatcgtaccatttgttcgttcgatttttggtggaacaggttttggcattttatcaggtgtctgtgttctttttgtcatgattctaccgacagttacctttatgacggtggatagtttgaaagcagtcccaagacattataaagaagccagtcttgctatgggggctactcgttggcaaacaatctggcgtgttatcttgaatgctgctcgacctgggatttttacagcggtgatttttggtatggctcgtgcttttggtgaagccttagccattcaaatggttgtcggaaactcagccgttgttcctacatcattaacaacaccagcagcgaccttgacctctgtgttgacaatgggaattggtaacacagtcatgggaactgtccaaaataatgttctttggtcactagctttagtcttgctcattatgagtttaggatttaatatgctcgtgaaatttattacaagagaaagaaagagaaattatgcacgctaaaaaaattgataaattagcaacaggagttctctatacaatcgctggaattattgttgcaattttggcatctttgctactttatatcttggttaatggtttaccacacgttagctggtctttcttaacaggaaaatcatcatcttatcaagctggtggtggtattggtattcagctgtacaattctctctttcttttagtgattacattgattatttcaattccgctatcaatgggagcaggaatttatttatctgaatacgctaaaaaagggcgttttacgaatttcattagaacttgtattgaaattctatcatctctaccatcagttgttgttggattgtttggttaccttatttttgttgttcaatttcaatacggtttctcaattatctctggtgcccttgccttaaccgtatttaatctgccacaaatgacacgtaatgttgaagatggtcttcgtaatgttcaccatacgcaacgtgaagcagggcttgcacttggtttatcacgttgggaaacagttgttcacgttgttgtaccagaagctttgccaagtattgttactggtattgtgcttgcttcaggacgtatctttggtgaagcagccgcgctcatttacacagcggggcaatctgcgccagctcttgattggtcaaattggaacccacttagtgtgacaagtccgatttctatcttccgtcaagctgaaacgctcgctgttcacatttggaaagtcaatagtgaaggcactattcctgacgcaacacaagtttcacaaggaagcgccgcagttctattgattttcatcctcattttcaacctatcagctcgttatatcggtaagaaacttcatgcgaaattaacgtcagcaaactaaaggagaagaaatgacagaatataattggaacgaaagacatattattacatttccagaagaaaagcttgccttggcaacgaaagaccttcatgtttattatggtcaaaaagaggcaatcaaagggattgatatgcagtttgaaaaaaataaaatcactgcccttattggtccatctgggtgtggcaaatcgacatttcttcgtagtttgaaccgaatgaatgacactattgatattgccaaagtaacgggtgaaattttatatgaaggcattgacgttaacgccaaaaatatcaatgtttatgaaatgcgcaaacacattggtatggttttccaacgtcctaacccatttgcaaaatctatttataaaaatatcacatttgcctatgaacgagcaggtgtgaaagacaaacaattcttagatgaaattgttgaaacatctttaaaacaagctgcgctttgggatcaagtgaaagatgatttgcataaatcagctttcacgctttcaggcggtcagcagcaacgtttgtgtatcgcgcgagccattgctgttaaacctgacattcttctaatggatgaaccagcgtcagctttggacccggttgctacaatgcagttggaagataccatgtttgaattgaagaaagattataccattatcatcgtaacgcacaatatgcaacaagcagctcgtgctagtgattacacagcatttttctatttgggagatttgattgaatacgataaaacgaacaacatcttccaaaatgcgaaattgcaatctactagtgattatgtgtctggacattttggttagaaaggaaagacatgacagaacctattttaagagtaagtgacttatctgtttactataataagaaaaaagctttaaataatgtgtctatggatttctatcctaatgaaatcacagccttaatcggaccttctggttcaggaaaatcaacacttttgcgttcgattaaccgcatgggtgaccttaatcctgaagtaacattgacaggttcaatcacttataacggtcataatatttatagcccacgaacagatacggttgaacttcgcaaagaaatcggcatggttttccaacaacctaatccatttccaatgtcaatctatgaaaatgtcgtttacggtttacgtttgaaaggaattaaagataagcaagttcttgatgaagccgtcgaatcatcacttatcggtgcctctatctgggacgaagttaaggatagattgcacgattctgcgcttggcttatcaggtggtcagcaacaacgtgtgtgtgtagctcgtgttttagcaacaagtcctaaaatcattttattagatgaaccaacatcagcgcttgacccaatctcagcaggtaaagtggaagatacactttatggtttgaaagataaatatacaatgcttatcgtaacacgttcaatgcaacaagcttcacgtatttcagaccgaacaggatttttcctcggtggtgaccttatcgaatatggaaaaacacacgaaatgttcatggaccctaaacgaaaagaaacagaagattatattacaggaaaatttggttagtcttagcagcttgaaaaaggagatggtattatgttaaggtcaaaatttgacgacgaattagaaaaattacacaatcaattttacgcaatggggactgaagtcctttcacaaatcaataagaccgttcgagcattcatcagccatgatcgtgaattagctaaagaagttatcgaaggtgatgaaattgtcaataatttcgaaacaaaattagagaaaaaatcacttgaaatcattgcattgcaacaaccagtttctcaagatttacgtactgttattacagttttaaaagcttcaagcgacgttgaacgcatgggtgaccacgcagcttcaatcgctaaagcaactatccgtgtaaaaggcgaagaacgtttaccagaagtcgaagcagaaatcaaaaaaatgggtaaagctgtgcgtgacatggtagaagaagctttggacgtttatatcacaggcgacgaagaacgtgcttacgaagtggccgcatcagacgaagtgattgataactatttccgtgacattcaaaatatggctgttgagtcaatccgccaacaacctgacaccgtttttgccgggaaagaatacctacaagttatcacttacttagaacgtattggtgactacgctcgtaatatttgtgaatgggttgtttaccttaaaactggtaaaatcattgagctgtaatacgagaaacaaagagaaggagcgaccttctttttgttttattttttaaaactgacagatatttaggtttgtgatataataatgtagtttgatagtacttaaccatcattaatttaaagacacgattatttcatagtaagtattgtcagaattatttaaaagattaagggatatggggagaacggttgttagtcctcatttctatattttaaaggagttatatgaaaactgtagaacattttattgaaaagtttgttcctgaaaattataatatttttcttgacattaaccgtcagtcgaaaacgttttcaggtaacgtagccattagcggtgaggctttagataatgttatttcattccaccaaaaagatttagccattgcttctgttttgttagacaatcaaaacttagagtttaccattgataacaacaacgaagctgtccatgttgaactaccagaaacaggtacaatgacacttgttcttgagttctcaggtaagattaccgataatatgacaggtatctacccttcatattacactgttgatggtgtcaaaaaagaagtcatctcaacacaatttgaaagtcactttgcccgcgaagcttttccttgtgtggacgaaccagaagcaaaagctacttttgatttgagcattaaatttgaccaaactgaaggtgaaatcgtgctttcaaatatgccagaagttgatgctgaccgtcgtaaggaaactggtctttggacattcgatacgacacctcgcatgtcatcataccttctcgcatttgctcttggggatttgcaaggtaaaactgcaaaaactaaaaatggtactgaagttggtgttttctcaacaaaagcacacgctcttaaatcattagactttgctttggatattgctgttcgtgttattgatttctacgaggattattatggcgtcaaatatccaattccactttcataccatgttgcccttcctgatttctcagctggagcgatggaaaactggggcttggttacttaccgtgaagtttatcttttggttgacgataactctaccgttaagagtcgtcaaaatgtcgcacttgttgttgcacacgaattggctcaccaatggtttggtaaccttgtcacaatgaaatggtgggatgatttatggctcaatgaatcatttgccaatatgatggagtacgtttctgttgatgtcattgagccttcatggaatatctttgaagatttccaaacagcaggtcttccattggcgcttcaacgtgatgctactgacggtgttcaatctgtgcacgtcgaagttaagcatcctgatgaaatcaatactttgtttgacccagccattgtttatgctaaaggaagtcgcttgatgcacatgcttcgtcgttggcttggtgatgacgatttccgtgctggcttgaaaatttactttgaaaaacaccaatatggcaatactattggtcgtgatctttgggatgcgttatcagaagcatctggaaaagatgttgcagccttcatggacgcttggttagaacaacctggttatccagttgtgacagcagaagttgttgatgatacacttgttcttagccaaaaacaattcttcatcggtgaaggtgttgatgaaaaccgtatttggccaattccacttaatagcaattggcaaggacttccagaaacgttgactgaagctcgtcttgaaattccaaattacagccaattagtagcgcaaaatgaaggagctcttcgtctcaatacagaaaataccgctcactacatcacaaattataaaggcgaattattgaacgctgttcttgaacaattgactgaacttgatactgttgcaaaacttcaagtcatccaagaacgccgtttgcttgctgaaagtggtgagatttcatacgcagaacttgttccattattgacaaaacttgctgatgaaacttcttatttggtagcggaagctatttcacaagttgttgaaggtttggatattttcttgacagaaggaagccaagctcaagcacaatttaaagccttgcttagccacctcatgcaaaagaattacgaccgcctcggctttgaaccacaagcaggtgaatctgacgaagatgaaatggttcgtcaaaatacgatttcattgatgttgtacgcagacaacgaagatgctgtgacaaaagcggaagctattttccatcaatataaagataatatcgaagctattccagcttcaattcgcttatctgttttggcaaatcaaatcaagcacgctgaaacagaagaacttgtttcactttacctcgatacttacgtgaaaacaaacgatggtaacttccgtcgtcaattagcttctgctttatcaaatacaaaatcagaagttacagttgaacgtatcttaagcgctttgaagaacaaagacattgtgaaaccacaagacttagcaatgagttggtatcgtccattccttgaaaaagattttgcgcaaggagcgttctggacttgggcacgtgaaaactgggcttggattaaatcagcgcttggtggtgacatgagttttgataaatttgttatctaccctgccaattcattcaaaacagctgaacgtcttgcagagtacaaagctttctttgaaccacaacttgatgatatggcaatcagccgcaatattgcaatgggaatcaaagaaatctctgctcgccttgatttgattagcacaagtaaggtcgctgtcgaagaagcacttgcagaagttgaataaaaataaaacgtctgagatttttttcagacgttttttcaatactagtaattgtaaccgttactattttagataatcttaagctcagtcagatatgctttttatcaggaaattactacgaaaattaagaaatttgttgtaaaaacttagaccaaagtagtaagtcatgatataataatataaatgcaaggagtatatgtatgattaagatattattagtagaagatgatttgagtctatctaattccatttttgattttttagatgattttgcagatgttatgcaggtatttgacggcgaagaaggtttgtacgaagctgaaagtggcgtatatgaccttattttgcttgacttgatgttacctgaaaaagatggtttccaagtgcttaaagagttacgagaaaaaggtgtgtcaacaccagtacttattatgactgccaaagaaagccttgatgataagggacatggtttcgagctgggagcagatgattatcttactaaaccattttaccttgaagagctaaaaatgcgtattcaagctcttttaaaacgttcgggtaaatacaacgacaataccttatcttatgaagaattaaccgttgacacttctaccaatacaacaatagctaacggtaaagaagtcgagctgcttggtaaagaatttgatttgttggtttatttcttacaaaatcaaaatgttattttaccaaaatcacaaatttttgaccgtatttggggctttgatagtgatacaacgatttcggttgttgaagtttacgtttcaaaaattcgaaaaaaactcaaaggcactacctttgccaaaaatcttcaaaccctacggagtgtaggttatattctgaaaaatgctgaataaattacagaaaaaattatcgtcagggacattttcacatttcttccatttctttgctgtctttacgggaatttttgtcatcatgacagttatcattttgcagattatgcgctatggtctttattcctctgttgatacgagtttgcaaaatgcagcagacaatgccaatgattatgtcgtgcgaactatggaacgtagcgatactttgcaatcggatgattcttctacggacactttttcaggaggaacaagtagttctgagaaagcgaaacctagtaccggcggagttggtctaagtaacgttagcgttcttctttatgatgaagacggtaaaatcttaaatgctttggatgcttttgttcaatttggaacgttatcgacaacttttgatgaagatagtgtcggcgaaatcaaagaacagaagattacgaccatttttggtcaaaccgagaaataccatgtgctgactgtaaaagtgagtagtagcgagtatcctagtataaaatatgctactttccttgttagcgttcgtcagttagatgaagctagcgaacgatatgtaacaattacgatcactgttatggttattttctggattatttcggtcgtagcaagtgtttatcttgccaattggacaagaaaaccaattatggaaagctatgaaaaacaaaaatcctttgtcgaaaacgctagtcatgagttgcgtacaccgcttgctgttttgcagaatcgtttagaaagtctctttaggcgacctgatgctacaattttggataatagtgaaagtattgccgccagtctagacgaagttcgaaatatgcgaattttgaccacaaatctgctgaatttggcacgtcgtgacgatggtttgaaagttgagttggaggatattcaaccaacgactttcaatgaaatctttgaaaattacgatatgattgctgaagaaaatggcaagacatttgtcggacataatttggcagagcgaccaatcaaatcagatcgtacattgttaaaacaactgatgactatcttatttgataatgccataaaatacaccgacgatgatggtgtcattgaatttaccgttaaaacaacagacaaacaaacaattctgacagttgctgataacggcccagggattagcgacgctgataaagttaagatttttgaccgtttttatcgtgtggataaagcacggacacgtcaaaaaggtggttttggtctaggattgtcacttgctaagcaaattgttgacgttttaaaaggcgatattcaagtcaaagataaccaaccaaaaggaactatttttgaagttcgttttaatcgtcattaataaaataaagggagctgataaattctcagcttcctttttgcttatattcgtttttctttggcaattgtaaactttaattgctagaaaaactatttttgtaaaagaaaaaaactccatttggagttttcattggatattagttagccaatttagcagcaagacgtgctttatcgcggctagctttgtttttgtgaatcaacccttttgattcagctttatcgatgctagaagaagcagcgcggaaaagctcttcagatgggttagcttcgaatgctttgatagcagaacgcatagctgatttttgtgctgagttcttttcgttttgtttaacgttaagttcagcgcgtttgatagctgatttaatatttgccaatgttttcacctccaaattaatctaactacattattatatagaaattattgacttttggcaagtcttaatcaccctttcagaaaaattacttactttttcaaataaatactatcaattttatggtctgcagccttgtgtaaaatcaattcagcacggtttcgcgttggttcaatgtatttttcaagattgactaaattgattgttttccaagtgttcttagctaaagctaaggcttcgctttgtgacatatcgacaaaacggtgataatagttgtttttgtctacttttgccaattctaataagctttcaaaacgttccaaataccatttttcgatattatcgttttctgcgtcgatgtaaattgaaaaatcaaaataccctgtcatgtacaatcgtttattcttctggttttgaaaaacgttgattccttcgacaatcagaaaatcaggggtatcaatcgtttgtttttggtcaggaatgatgtcataaatttcatgcgaataaacaggaatttcagcgaccatgccatttttaacggtatcgaggaaatttagcagaagttccatgttataactttcgggaaatcctttgcggtcaagtatatttcgctcaattaaaatatcatttggataaatgaaaccgtcagtcgttaccatttcaactttgctatctttgaaagtccgtgataggagaagttgcaaaagacggctagtcgttgattttccgacagcaaccgatcccgaaataccaatgataaatgggcgtttactcacttcttttttcagaaaaatactttttgaaaatgaaagattctcttgagcatttttgtaaatctgaattaagctaatcaaaggaagataaacttcaaccacatcttgaatgttgatattgtcattcaaacttttaattgattccaattcttcagcagtcagaagaggctgtgttttgcgatgcaattcttgccaagtttttcgagaaatattatcaaaattaataaattcgttcgtcatacaaagctccttacagagggttatgtgctctattatagcactttaatccttaattgaaaaccgttacaatttatgttaaaatggaaaagcattctaggaggaaatggtagaaaatgacaaagatgtattatgcagaaaatcctgatagcgctcatgacattcatgagttgaaggttactcttttggggcaacccttcacatttttaaccgattcaggtgttttctctaaaaaaatgattgattacggcagccaagtgcttttgaatacgttggattttgaaaaaggtaaaacgcttttggatttaggttgtggttatggtccgctaggtatttctttagcaaaagttcaaggtgttcaagcaacaatggttgatattaacaaccgagctattgatttggcgcagaaaaacgctgaaaaaaacggtgttacagcaaatatttttcaatctaatatctatgaaagggtaactggcacttttgattacattattagcaatcctccgattcgtgcaggaaaacaagttgttcatacgattatcactgatagtatcaattatcttaatggcggtggtagcttaacaattgttatccaaaagaaacaaggagcgccgagtgctaaagctaaaatggaagaaatttttggcaatgttgatatcctaaagcgtgataaagggtattatattttacgaagcacaaaaactgaataattgaataaaaaatctttattaaatgagatgataaatcttgtttagtaaggatttttttatagattcccataatatcaataattgtgacagatgtcataaaataaatatgacataaaagtcagttttggcggtataattatgctttgaaaagtcataaaaaaacgcaatataaatcgcttacaaaacgtcaaaatattattttcaaatattgtaaattccttcccttaagagctattttgtctcaaaaagttcagaaatagcgaacatgacatatgacacaaatgtcatgtttgaatcaaaaaccttgctgtaacaaggcttttttgaaggtaatgaattataaaatcattttaataatttttcggtttttgccatttttactaattattaaaaaatcggaaaaaagtacttacatattttaaaaaaaatggtagaatagagagagtgtaattattaatcgattgaaaagaattttcggaaggaagtaaaaatggctattaataggtatattgatcatactttattaaaacctgaaagtactcaaactcaaattgataagctgattgcagaagcagtagagcatcagtttgctagtgtttgtgttaatccaacttgggtatcatatgccgctaaggctttaaaaggtactgaagttaatgtttgtacggttattggttttcctcttggggcaaacactagtagtgtgaaagcttttgagacgaaagatgctgttgctagcggtgcagatgagatcgatatggttatcaatatcggtcaattaaaatcaggacaatatgacgctgttgaagctgatattcgcgctgttgtagaagcaagcggtgataagttggtaaaagttatcattgaaacttgtcttttgacagacgacgaaaaagtaaaagcttgccaattagcggttgcagcaggtgcggattacgttaaaacttcaactggtttttcaactgcaggcgcaaatatcgccgacgtgacattgatgcgtaaaactgttggaccaaatatcggagtgaaagccgcaggcggtacacgctcatatgcagatgctgaagcttttattaaagcaggtgcaacacgaattggaacttctgcaggtgtagcgattgtcaacggtgaaactgctaatagtagttactaacattaataatattttttacgttatgaaatagaagagcaaaggtggacggtcgtgatgacggtcaagtggcttattaccacagtctataaggcttgaaaaagtcttcttaaaagtgtcattgagccaattggcttgatatatatttagcaactgtgttgcttataagttttttaggagggttcattttcatgaacaagaaaattgttggtcttggacttgctgcagtagcaacattagcacttggtgcttgtagccgttcaaattcatctagctctagctctgattctagcgtaaaagccgctattgtaacagatacaggtggtgttgatgataaatcatttaaccaatcagcttgggaaggtttgcaagcttggggtaaagaaaatgatttaacaaaagatactgactacacttacttccaatcagatagcgagtcagactatgcaactaaccttgattcagctgtttcaaacggttataacttgatttttgctattggttacaatcttcatgatgcagttgaagaagctgccccagaaaacgaagatgttaactatgttatcattgatgatactgtttctgatcaagataacgttgaaagtgtcttgtttgctgataacgaaggtgcttatcttgcaggtatcgcagctgctatgcaaacaaaaacaaaacacgttggttttgtaggtggtgttgaatcagatacaatcacacgttttgaagctggtttcaaagctggtgtggcatcagttgatagctcaatcaaagttgatgttcaatacgtgggttcttactcagactctgctaaaggtaaaacaatcgccgctactatgtacgcaggtggcgcagatgttatctaccatgccgcaggtggttctggtacaggtgtcttctcacaagccaaagaaatcaatgaaaaattaacagctgatagcgaccaaaaagtttgggtaatcggtgtcgatcgtgaccaatcagaagaaggtgactacacatcatctgataacgttgattctaattttgttttgacttctacaattaaagaagtaggacaagttgttcaagatatttctaacgaacagcttaaaggtgaaaaattcaacggaaacacaacaaaaacatatggtcttgcagacggtggtgttgatgttgtcacagacaacctttctgatagcattaaagaagcggttgaaactgccaaacaaaaaatcatcgatggtgaaatcactgttgatgatggtttgagtgattaaaaatcatcattcttgaaggaagcgaccaaataggtcgccttttttcagggctgaggaaaatagcaattttacctcagttaagttcattaaaaaactctttttagagaatttagtgggcttaactgacctaaaattattaattattagactgaaaggatcacatatgacacaagaaaaagtcattgaaatgcgtgaaattactaaaaaatttggtgattttgtagctaatgaccatatcaatttagaagtcaaaaaaggtgaaatccatgcccttcttggggaaaatggtgccggaaaatcgactttgatgaatatgcttgccggtcttttacaaccaacaagcggtgaaattttagtgaagggagaagttgctcacttagattcaccttcaaaatcagctaaaatgggaatcggaatggttcaccagcactttatgttggttgaagcttttacagtggctgaaaatattattttaggtaacgaggtaaccaaaaaaggtgggattcttaatctaaaaaaagcaactgaagaaatcaaagagttatctgaaagatacggtttagcagtcgatccgtcagctaaaatctcagatattactgttggagcacaacaacgtgttgaaattttaaaaacactttatcgcggtgccgatatcattatctttgacgaaccaacagctgttctaacaccttctgaaatcgctgaattacttgatattatgcgtaacttggttaaagaaggaaaatcaatcatcttaatcacacataaattggatgaaatccgtgccgttgctgatagggtcacagttattcgtcacggaaaatctattcaaacagtaccagttgctgattcaacaagtgaagaattagcagagatgatggttggacgtgctgtctcgtttaaaaccgaaaaaattcctgctaatccaaaagacgttgttctttccgttaaggatttagttgttaacgaaaatcgtggtgttcctgcggtcaaagaactttctctggatgtccgtgcaggtgagattgttggtattgctggtatcgatggtaatgggcaaagtgaacttgttgaagcaatcactggtcttcgtaaggtcgaatcaggtaacgtcatcattaaaggcgtggacatgacgaatgaacgtcctcgtaagattacggaattaggtgttggtcatgttcctgaagatcgtcatcgtgatggtatggttctagatatgacaattgctgaaaatatcgctcttcaaacatactataaagaaccatttagtaaacacggtttcatgaactataataaattaaacgaacacgcccgtgagttgatggcagaatttgatgtccgcgctgctagtgaattggtagcaggcggtgcgctttctggtggtaaccaacaaaaagcagttatcgctcgtgaaattgatcgtaatccagatttgttgattgttaaccaaccaacacgtggactagacgttggtgcgattgaatatattcgcaaacgtcttgttgctgagcgtgataaaggaaaagctgtactcgttattagttttgaattagatgaaatccttgatgtttccgaccgtattgccgttattcatgatggtaaaattcaaggtatcttagacgctgcccaaaccaataaacaagaacttggtattttgatggctggcggaaaagtggaaaaggaggatgctaatgtctaagaaaacacaaaaatgggctgttcctttaattgccgttgttctcggtatgttattaggggcaatcctcatgctttgctttggttataatcctctttgggggtataacgacctactttatactgcatttggttctattaaaaatatcggtgaaatcttccgtgccatgggtccgcttatcttaatcgctcttggtttctcggttgcttcaaaagctggtttcttcaacgttggacttccgggtcaagctttgatcggttgggtaatgtcagtgtggttcgcactttctttccctgatttaccaaaaccaatttcagtgatttgtactatcgttgttggacttgttgctggtggtatcgctggtgcaattcctggtatcttgcgtgcattccttggaacaagtgaagttattgtcacaattatgatgaactatatcattttgtattcaacacagtaccttatccaaaatgtttttcctgacaatatcatgcgtacaacagaagcaactatcaaagtttctgaaaatgcctcttatcagacagaatggctctcagcactaacaaacaattcacgtatgaatattggtattttcatcgcttttatcgctgttattatcatctggtttatgatgaagaaaacaacacttggctacgaaatcacatctgttggtattaacccacatgcagcagaatatgctggtatgtctgctaaacgcctaattatcatttcaatgattatctcaggagcacttgctggtcttggtggaacagtagaaggtctaggaacatttgaaaatgtttattctcaaacaagttcattaagcattggttgggatggtatggcggtttcgcttcttgcggttaataatgctattggtattccatttgctgccttcttgtatgctgttctttcaattggtaaaacaggtatgattggtattccgtcagaagttattgacgttgtttctgctttcattattttctttgttggagcagattatatgatccgtcattttcttaaaactaaaaaagtagaaggaggaaagtaaaatgagttttacaacaatgttagccctattagtttcttccatgttaatctattctgcacctttaatttttactagtatcggcggaactttctctgaacgtgctggtgttgtaaatgtgggacttgaagggattatggtcatgggggcattctctggtgttctctttaaccttagctttgcagatgttttcggaaatgctacaccatgggttgcctcaatcgttgctggattcgtcggtgtgctttactcactaatccacgctgtcgcaacaattaatttccgagcagaccacgttgtttctgggactgtattgaatttgattgcaccttcatttgcagtctttcaatgtcgttacctttttggtaaagggcagacggataccatctcagaaacatttggacgtttttcattcccaattttaaaagatatcccagttattggacaaattttctttaacaatacgtcattggttgcttacgttgccattttagtgtcgtttatttcatggtttatcattttcaaaacacgttttggacttcgcttgcgttctgttggtgagcatccacaagccgctgatacgcttggaatcaatgtctatcttatgcgttatgctggagttatgatttcaggtttctttggtggtatcggaggtgctgtttacgcgcaaacgatctctaataactttgcggttacaacaatcgctggtccaggtttcattgctttagctgccatgatttttggtcgttggaatccaatcggtgcaatgctttcaagcttgttctttggattgtcacagtcacttgcgattattggtgcacaattaccattcttctcaagtatcccatctgtttacctaaaagtagcaccatacgttttgacaattgtcgttttggctgccttcttcggtaaagcagtagcacctaaggctgatggtgttaactatattaaatctaaataaagtgaaaataagttggttttaccagcttattttttataagcaaattatttgtaagcgttttataggtatggtatattagtcatgttaaatttaattagttagaggttactttctatgagtaaaattgttgttattggagcaaatcatgctggtacagcttgtataaagacaatgttaaccaattatggtactgaaaatgaagtagttgtttttgatcaaaattcaaatatttcatttctcggttgtggtatggcattatggatcggagaacaaatcgctggacctgaaggattattctattcagacaaggatgaattagaacaacttggtgctaaagtttatatgaattctcctgtggaatcgattgattatgataaaaaagaaatcacagcacttgttgatgggcaaaaacattttgaaacatatgataaattaatttttgcaacaggctcacagccaatcatcccgccaattaagggtgttagcatgaaagaagattcgcttgaatttgaatcaaaactcgaaaacgttcaatttgttaaactttatcagaatgctgaagatgttattgagaggttgaaagagaaagctatttctcgtgtagctgtcgtcggagcaggctatatcggtgttgaattagcagaagctttccaacgcaaaggaaaagaagtaacgcttatcgacgttgcagagacttgtttagctggatattatgaccgcgatttgagtgacgcaatggcaaataatttacaagaacacggcattcatttagcatttggagaagctgtgcaggaaattgttggtaagacaaaagtggaaaaaatcatcactgataaatcagaatatgatgtcgatatggttattctagcagttggttttcgtcctaatacagcattggctcaagataaaattaaattgttcccaaatggtgcctttttagttgataaataccaagaaacaagtatgcctgatgtctatgctatcggtgattgtgctacgatttataacaatgcgacacaatcaacagattacatcgcccttgcttcaaatgctgtccgtacaggaattgttgcagcacacaacgcttgtggtcataaactagaaggagcaggtgttcaaggctcaaatggtatttcaatttatggcttgaatatggtttcgacaggattgactctagaaaaggcaaaagcaaaaggttttgatgctcttgaagtcgagtatgtggataatcaaaaaccagaattcattcaaaaagataatttccaagttactctaaaaattgtttatgataaaacatcacgtgtcattcttggtgcacaaataatggcgaaaaaagacatctcaatgggaattcacttattctctcttgctatccaagaacaagtaacgattgataaacttgctttaacagacttattcttcctaccgcacttcaataaaccatacaactatattacaatggcagcattgaatgcgaaataaatagaatacaaaaaagctatcctgaatcaggatagcttttattatgttaaaaactagaattagtttttagctgcagaagcgaattcttctttagagaaagcttcgtcgatgatagctttcaattctttagcagaagcttccattttttgttgttcagcgtcattcaaaggaatgttaactggacgaacgataccgtgagcaccaacgatagctggttgaccgatgtagcagtcagttacgccagggtattgaccttcttggaatacagaaagtggaagaactgcattttcgtcatcaaggattgctttagtgatacgagcaagcgcaacagcgataccgtagaatgtagcaccttttttgttgatgattgagtaagcagcgtcacgaacaccttcgaaaagttcaaccaattcagcttcgttaacgttttgaacatctttaaggtagttttcaaggtttacacctgcaacgttagcgtgtgaccaaactgcaaattctgagtcaccgtgttcacccatgatgtatgcgtgaactgaacgtgcatcaacatcaagtttttcagccaatgcttgacggaaacgagctgagtcaagtgaagtacctgaaccgataacgcgttctttagggaaaccagagaatttccatgtagagtaagtcaaaacatcaactgggttagcagcaactaagaaaattccgttgaaaccagatttaacaacttcagttacgattgatttgttgatggcaaggtttttaccaacaaggtcaagacgagtttcacctggtttttgaggtgcaccagcagtgataacaacaaggtcagcatctgcacagtcttcgtatttagcagcgtagatttttttaggtgaagtgaaagcaagagcgtggctaaggtcttcagcatccccaacggctttgtcgaacaattgtgggatttcgatgataccaagttcttgtgcgattccttggtttacaagtgcgaatgcgtaagatgaacctacggcaccgtcaccaacaaggataacttttttgtgttgtttagttgcagtcatttatctaaacatctccttaatttttttaggggctctcgcccatacgataatattttaacacgttaagtgagatatgtcacgaactaaattgtaaaaactttgaaaaaaagaagaaagctagtgattctggcgaaaagcgctatttttgccaaaaatgtggtataatatagtagagttttacactagaaaaggagtgtttttccttaatgcaggataagaatttaattgacgtaaatttgacttcagaaatgaagacaagctttattgattacgccatgtctgttattgttgctcgtgcgcttcctgatgtacgcgatggattaaaaccagttcatcgtcgtattttatatggaatgaatgagctcggtgtgacaccagacaaacctcataagaaatctgcgcgtatcactggggatgttatgggtaaatatcacccacatggtgattcgtctatttatgaagccatggttcgtatggcacaatggtggagctatcgtcatatgctcgttgatggacatgggaacttcggttctatggatggtgacggtgctgccgctcagcgttatacagaagcacgcatgagcaaaattgctcttgaaatgcttcgtgatattaacaaaaatactgttgacttccaagataactacgatggtagtgagcgtgagccgcttgttttgccgtcacgttttccaaacttgcttgttaacggtgctacagggattgccgttggtatggcgacaaatatcccaccgcacaacttaggagagtctattgacgctgtcaagctggttatggacaatcctgacgtaacaacacgtgaattaatggaagtcttgcctggtcctgactttccaacaggtgcacttgttatgggtaaatctggtattcgtaaagcttacgaaacaggtaaaggctcaatcgttttacgttctcgtactgaaattgaaacaactaagagtggacgcgaacgtatcgttgtcacagaattcccatacggtgttaataaaacaaaagtacacgaacacattgttcgcttagcgcaagaaaaacgtattgaaggaattacagctgttcgtgatgaatcaagccgtgaaggtattcgtttcatcattgaagtacgccgtgatgcttcagcaaatgttatcttaaataacttgttcaaattaactagcttgcaaacaaactttagctttaatatgcttgctattgaaaatggtgtgccaaagattctttctttgaaacaaatcatcgttgattatattgaacaccaaaaagaagttattgttcgtcgtacagaatttgataaagctaaggctgaaaaacgcgctcacatcttagaagggttgctggttgcacttgatcatcttgatgaggttatcagcattatccgaaacagtgaaacagatgtgattgcccaaggcgaattgatgagccgttttgatttgtctgaacgtcaaagtcaagctatccttgatatgcgtcttcgtcgtttgacaggtttggaacgtgaaaaaatccaagctgaatacgatgatttactcgctttaattgctgatttagctgatattttggcaaaaccagaacgtgttgtcgcgatcatcaaagaagaaatggatgacatcaagcgtaaatatgctgacccacgtcgtacagaattgatggttggggaagttctttctcttgaagatgaagacttgattgaagaagaagacgttcttatcactctttcaaataaagggtatattaaacgtttagcgcaagatgaattccgtgcccaaaaacgtggtggacgtggtgtccaaggtactggtgttaatgatgatgactttgttcgtgaattggtatcaacaagcactcatgaccatgtttactttatgacaaacaaaggtcgtgtttatcgtttgaaaggttacgaaattccagaatatggacgtacagccaaaggattaccaattgttaaccttttgaaattagatgaaggcgaaattgttcagacaatcattagtcaatctggacacgatgacaacgaaagttatcttttcttcgttacgcgtcaaggagttgttaaacgtaccaaagaatctgaatttagcaatattcgtcaaaacggactaaaagcccttaatcttaaagacggtgatgaattaatcaacgttatcagaacaaatggtaacgacgatattattatcggtactaaaactggttacagcgttcgtttcaatgagtctgccgttcgtagcatgagccgttctgcaacgggtgtccgtggtgtcaatcttcgtgaaggtgatgaagtggtcggagcttcacgcatttcagatgaccaagaagtgcttgttatcactgaaaaaggttacggaaaacgtacattggcttcagaatacccaactaaaggtcgtggcggtaaaggtattaagactgcaaatattacggaaaagaatggtcagttagcgggggtagcaaccgttaatggcgacgaagatattatggttattactgacacaggggttattattcgtacaaatgttgctagcatctcacaaacaggtcgtgccacactaggtgttaaaatcatgagacttgaccaagacgctaaaattatgacgtttgcacttgttgaaccagaagaagaggaagaaaaaactggagaagacctagagtagtatggtaaaaaaagagaaaaaaacacatcgtttttggaatactcttagattgtttttatgtttgcttttattgattgttggcatagctttgatttttcacaaatctatttgtaattttttaattggtcaagagtcgaatcattatcaaattactaaagtttctaaaaagaaaatcaaggaaaatgagagtgctgatgttacttatgatttttcatcagtagaacctgtttccattcaatctgttttaaaagctcaggcaaatagtgctaatctgcccgttattggtggcatagcagtgccagatgttggtattaatttgccaatttttaaaggactaggaaatacagaattatcctatggagctggaacaatgaaagaaaaccaagtcatgggtggtgaaaataactatgctctagctagtcatcacgtgtttggtttggttggttcttccaaaatgcttttttctcctctagaaaacgcaaaagtgggaatgaaaatttatttaacagataaatcaactatttacacttatgtaattacagagattgaatcagttaccccagatcgctcagatgttattaatgatactcctggacaatctcaagtgacgcttgttacctgcatggaccaagacgcaactgaacgtattgtcgttaaaggaaatcttgaatcttccgtagcttataacgaggcatcagatgatattcttgaagcatttgagtattcctataatcaaatgacattttaaggtaaaagctgggacaaccccagcttttatttcttgttaaggagaaaggagaaaataatgaaattaaatgcagttcaccatgtcgcactaattgtttctgactatgaaaaatcacgtgatttttacgtcaataaattaggttttgaaattattcgtgaaaatcatagaccagagcgacacgattacaaacttgatttaaaatgtggaacgattgaattagagattttcggaaataagctcagcgatccagattatgttgcaccgccaaaacgtgttgggcaacctgagtatcatatggaggcttgtgggctacgtcatttggctttttacgtcaatgatgttgatgcttacaaagctgaattggaaagcatgggaatttatgttcagcctgtgcgctatgatgattatacagacaagaaaatgaccttctttttcgacccagatggtctgccactagaattacatgagtagtttagtaggagataaaacagtttttttcagactgaattctcaataaatggtataatagggtctctaagagaaaggaaaatgattaagatgaaatttaaaaagacattgatggcttgtgctttagcagttttatctattgtcactgttaacagcgtccaagcgtcaagtaactctgttcaggatgtcattgatgaaacttatgttcaacctgactatgttttaggatactctttgtcagacgaccagcgcacacaaacgttggctttgttaggttatgacagttcaacggatacaagcgttaagactattacaacaagtgcctatgctaatattatgaacgtcgcagacgattctagtttgcaattgtattcatctgttaaaattcaaaaattaggttcttcagagactttgacagttaatattgtcacaccagagaatattacaaaagttactgaagatatgtatcgaaatgcagctgttacactaggtattgaacacgcagctattacagtagcttcaccaatcgctgttacaggtgagtcagcgttagctgggatttattattctttagaagaaaatggtgctgatgtttctgatgaaagtaaagaattagctcaagaagagttagaagctctatcgactatcaactctgagaatcaaggaacagacggttatgatgctgacaagttgaacgttgccttaaccgacattaaatcagccgttgcagatgctggtgatggcgtttcaaaagaagatgttcgtaaaatcgttgaagaaacccttgataattatgagctaaaagatgttttgtcaagtgaccaaattaccttgattgttaactttgcttttaacctttcaaaatcaagtatcattgatagcagtagttttaaatcaacacttgcttctttgaaagatagcattgtttcaaatgcaagttcaacatttaagggaattaatcttaattttgatgccacagacgctttggaatcaagtaaaggcttcctagcgaacatttggcaagcaattgttaatttctttaaaaatctatttaactaagctgtaaatttatgattttcctcgctttgaaaagcggggatttttaatgttcatttttttcaaactttttcctaaaataaggttgactttctgataggcaagttgtaaaattaggtttacacaattcagaattatctgaatattgaaaagtttatttagaaagaggtctgttttatgactgaaaatatagaacaacaatcgaattggcgaactaagctaaaggcgcttggtccaggtatcttgatggcttctgccgcggttggcggctcacatattgtatcttctactcaagcaggagctatctatggctggcaattagcgctagtgattcttctcatcaatattttcaaatacccatttttccgttttgggtcacaatataccatggaaaatgacaagagtttgattgaaggatatgctgaaaaaggtaaaggttggttagcgattttctttgttttgaatattttctcagctatcgttaacacagcaggggttggtattctttgtgcagctattctttacaacatttttccaaatggattcgggctaagcatttctcaattaacaacaattatcatcgtgattatttgggcaatgttgttgattggtggttacaaattccttgattcgttagcaaaatgggtcatgacagccttgacaattgcgactgttgtagctgtggttattgctctatttaaacaccgtgaatacgcaccagattttgaagctcctacgccttggcgtatggcagctctgccatttattgtatcattgatgggttggatgccttgtccgattgaaatttcagcaatcaactcaatgtggtctgtcgaaaagcgcaaacaagtcaaaatgtcagaagcagatgctatttttgatttcaatactggttatatcggaacagccattttagccctcattttctgtgctttgggtgcccttattcaatttggttcaggtgaagaagtacaaagcgcttcagcagcttacattgctcaatttgtcaatatgtacgcttctgttcttggcgaatggtctcgtttcttgattacgcttattgctttcctatgtattttcggaacggttatcacagttattgacgggtattcacgtgcgaataacgaagcgctccgtttgcttcttgacaaaaaggaatcttctcaaaaagcactttatggttggatgacattgacagcagttattggattggtcattgtttatctttttgctggtaatgttgcaacaatgcttcgttttgcaatgattgcatcattcatcacaacgccattctttgcttatcttaattattcattagtaaataacaaagaacatcaagttaaaccttggcttaaaaggttatcaatcattggtcttgtttatctatttggtttcgctttattctttatcatcgcatggctaactggtaacgtctaatcttggttctttggctatttatatatttgagcacctcatgattatgaggtgttttttttgtttgcataaatataattatgtaactaagttcttttaaatcctttttactttaaaatgaatatagttatgaagtaaaaacaaccccctcatgatagaaggagttgttttgatattaatcaatcaatgattatttaacgaaatcgttgatttctttttcgatattagcaattttagcttctgcatcagctaagtctgtaccaactgtagcgatatagaatttgatttttggttcagtacctgaagggcgaacggcaatccaagaatcgtctgcaagtgtgtatttcaatacattgcttggtggagttgtcaatttttcaacgccgtttgcgcttgtggctgtttgagccaagaaatcttcagttttaacaatatcagttgcgttgaattgtgcaggagcgttgtcacggaatttatccatgattttcttgatttcagcagctccatcaacaccgctaagcgtaactgagattgttttttctgcgaagtatccgtattctttgtagatttcttcgataccgtcagccaatgtcaaaccacgtgagcggtagtaagctgcgatttcagcaacgataagaacagcttgaacggcatctttatcgcgtacgaatggtttaatgaggtaaccgaagctttcttcgaaaccaaacatgtaagtgtggttgtgtttttcttcaaattcttgaattttttcagcgataaatttgaaaccagtcaagacattaaacattgtagcgccgtagctttcagcgatttttgttaccaattcagttgaaacgattgattttgccaaagcagcattttctggaagagttccagctgttttgtgagcctcaagaatgtatttagcgatgatagcaccgatttggttaccagaaaggttacgatatgaaccgtctgcttgacgaatttcaacaccgagacggtcagcgtctgggtcagttgcgacaagaacgtcagcgtcaactttgcgaccaagttcttcagcaagagcaaaagcttcttggttttctgggtttggagattttacagtagagaaatctgggtctggaacagcttgagcttcaacaacttgaactgaatcaaaaccagcttgagcaagtgcacgacgagcaagcatttcaccagtaccatgaagtggtgtgtaaacaatcttcatgtctttaccgtattcatcaatcaatttttggttgatgttaacatctttaacttctttaaggtattcagcatcgacagcttcaccgataacttcgataagaccagaagccttgctttcttcaaggtcagccaattcgatagcaaatggatcttcgatagcacggataaagtcagtcaaagcatcagcgtcagctggtggcatttgtccaccgtcttcaccataaactttataaccgttaaatggagctgggttgtgactagcagttaccatgataccagcaaatgtgccaagatgacgaactgcaaatgacaattctggtgttggacgaagtgattcaaaaacataagctttaataccatgttttgctaaaacttgagcagattcaaatgcgaattctggtgagaagtggcgagaatcgtaagcaatcgcaacaccacgttttttaacgtcttcacctttagtttcgatgagttttgccaaaccttcagttgcttggcggacaacgtagatgttaatgcggttagtaccagcaccaatgataccacgcatacctgcagtaccaaactcaaggtttgtgtagaaggcatcttctttggtcttctcatccatggctactaattcttcgcggagatagtcaggtagttccgcaaagtcaagccatttttgatagttttcagtgtaagtcataatggaactccttttctctgttcttctaaacgctttcattataccactttgtaaaagatttttctagtcctaatttgagataagtgaatatattgatatataagggttttgagggattttttcgaagattacgcaaacggttgtttaacccttgaaaacactcacttttttgtgaaaaaacttgaaaattttactagctttaagtaaaaaatcacaagctttttagcccatgattttcaacgttaatttttaatcttttgtaaacttggaacaagtgcaagtgttaaaatagcagaaataatcatttcagcgatagcatttgttccgaaaacaacagcaagcagagcttggatatttccgttataaacgtttgagaagagtaggaaaatgcctcctaaaacgaaaatagtatttgtcattgaaccaatcgcaccagcgataacgagtccagttctattatgtaaccatttataaacaaaataaggtgttataccgattagaatacgtggaacaagagcaatgattagcgaagcaaaattcccgttttcaacaaatggagaaaagagataacttgttggtaacaatgtcagagtgtttacggtaacactcataatccccattaatccacctaggatagcgccaattcgtggtccatagacaatagaagcgataataactggaacatgcacgagcgtaggcttgattggaacaggccaaaggttaaacactaagcttgttagaaaatttatcacaagcataatagcaaagaagatagcaataatagcaacatcggttgctgctttattttttttcataattcctcctaaatggactgaaaaatgtagcatttggaatttttagttttccaaatgcccaattcattatacaaatttacaactgtcttgacaagtattgattttgatttttagttcccaatggtgtcttgaattttttgaatgatagcgtctaattcagcaagagcaccacgtccaacatcaccgcaggcaagcatgcttgaacgcggttcaatttcttgataaccgacttcttgcaagatttgtaaattgcgttgcgttagtggattgtcatacatcttggtattcatagctggcgcaatcaattttggagtatctgtcggcaaagctagcgcagttgctgtgacaatattatctgcgataccatgagctaatttagcgattgtattagcagaagcaggagcaactacgaataagtcggcttgttttgctagttcaatatgattaacaacttttgggtcgtcttccttcataacatcaagatgaacaggattttttgataaaacttgcaatgttagtggcgttataaattgcgttgcagcttcagtcattaaaacgtgcacttgataccctaatttggttaactgattgcttaaatcagctgctttataggcagaaatgctccctgaaacagccagtacgattgttttagtcatgatttgtcaccctttcaaaaattaatttagccagctcagcttttgtttcggcttcggttacgtcgttttcactgagcaaataagcgtggtgctgtgtcccattgatttcatttaaatcattggcgacgatatagtgtgctttatttttcttcaaactagcacgcgccaccgcaaacaattcatccttgctgacgttaaccaacaatttaaagccaatcagcatgatatcaggattccatgttttgaccaaactgataaccttcggtgttttctttaaaaagagcacttgatagtctgctttagatgaaatttttgattcggtattttgctgtgtcagcaaatctgaaatatgctcggcattttcaacctcatctaaatcagtcatatagacaggagtgtaatcagacacagccatgctatgaataaaaacgtcatgtgttttgacaagtggctctaaagtttcaaccaaactgtcaacatttgagacgatataggttgtcaaatgtggttgtttttgtggtttgacagctcctttggttgttactaaagtcacctcgtgtccattttctaaaaatatttctgcaatgtattttcctaaacttcctgttgcgtgattagtaatgccacgaacagaatcgattttttcggttgttccaccagatgtgattaagattttcatagatttattgtacacaaaaacatttttttcgtaaattgtttaatacaaaatcaagaattaagttttcttttagctatttttcagaaaatctttagccaaattcgataggcttaattaagcttacgttgcatgaaaggaggaggcgatgagatttctaaaaaaacatgcttacactttgttatttagcacagctttattatctgcaaatgtttatgttcttttgaaaacatttgtgataccatcagcggtaactaaagttgctgcagaaacaagtagcacgacggcatcgacagaaacaggcgaagtgacgacaacagatacttcatatcaagatgacaatatctccatcaccattacaacaggaaatacaagcaatacaacgtattatgtagcagatattacactttctagtgcagattatttaaaaacagcgttagcacaggacacttttgggacgaatattacagaaaccacgtctagtatagcttcaagtaaaaatgccatttttgccattaacggtgactattacggcgctaatacgtcaggttatgtgattaaaaacggtgtgatatatcgtagtaccaatcgacaatctgattatgatgatttagctatctattcagacggtagttttggaacgtttaacgaaagtgacacgacagcgcaggaattgctagacagcggtgttgtcaatacctttgcttttggtccaacccttgtttcaaatggtcaaattgctgtttctgaatctgaagaagttggacaagctatggcagaaaatccacgaacagctatcggaattatcgaaacagatgacggtagtctgcattacatcgttattgtttctgatggtcgtacggatgagtcggctggcttgaccttgtatgaaatggcagagctgatgcaatcttatggtgtgacgacagcttataatttggatggtggtggctcatcaaccatgtatttcaatggtaaagtcgttaacaatccaacaacaagtggtaacacaatagaagaaagagcggtgagtgacattgtttacatcggttactaaacgaacatttggcagagtaacccttgtttatctcggcttaaccattttttgcattgtatttaccattatttatgaaaaattcagttatggtgaatcttccattttcatgcgattaatgtttctagcacctttagcaggagcagtggtctcatttttatcaggtcttaatttgacttggataacgaaacgcggaccatttcttttatttaattcaagcttagctattattgctagtgcttgcttggtgagaggcattatcgaagtttctggacgaacgagttcctatgaccaaccgtattggtgggctgcacttgctttttcaggtttgagcctagtcataggattgcttagccgagacaaaaaacaacattaacatatcaacggattaaaagaactgaggaattttatgaaaacaaaacagacattattctatagcgtatgtgcgcttactttgctaagtttgggcgcgtgttctcaaacaagtagcacatcatcaacgtcaagttcatcatcgacagtagcaagtacaacgtcagcaagcacttcgacagatgctaatactgattatttcactgaaactgacttaacatcaacctacgacgaatcatcagcatcaacgattaaattatcggattcatcagccaaagtatctggtgacggtgttagcgtggatggctcaacagttacgatttctgaagcaggaacttacattgtttcaggtgaaagtgacggggttcaaatcaaagttactgccgctgactctgacaaggttcagattgttctcaacggtgtcacaatgacaggaagcgatgctttgattgcagtcacatcagccgataaagtggtgattacatctgcagacggtacaacgaatactttgacggactctgaacatacaacagatgattacagtgcagccatttacagtaaaagcgatttaacctttaacggttctggaacattgactgtcgaaggtaattataacaatgctatcaagggaagtgacgacgttaaatttacaggcggaacctataatatcacatcaaccgttaaacatgctatttcggcaaatgatgctatcgatatttataattcaacccttaatttaacttctaccgaagatgctattcattccgataatgacgaagatacttctttaggaaatatctacattcaatcaggaaatattaccattaatgcaggtgatgacggtatccacgcttctaatgattttgtaattgacggcggaacaatcgatattcaatcatgtgtcgaaggtttggaaggtaagactatcacaatcaacgacggtactatctcaattaacgcctcagatgatggtatcaatgcgacagactgggcatttacaggtgacgaaatggaagcacaagatggcgttctcatcacaatcaacggcggggatattacaatcaatatggcagacggtgacacagacggtattgactcaaacggtgatttagtagttaacggtggaacaattaatatcactggacaatcagcctttgacttcagtggtaatgcaacttacaatggcggaactttgattgtcaacggtgaaacagaaacagaaattactgaaagtggacctggtgccggcggaggtcctggtggattttaagaaatagttttgggttcacaagaagaaaggaatctctattatgtacattatcattccagcttatgaaccagaccagcggcttgttcaagtcgtgcaagatatcaaagaagaacttcaagcagatatcattgttgtcaatgatggtagcgacgcttcttatgacacgttttatcatcaagttgaacaacttggggctacggtgctgattcaccccaacaatcttggaaaaggcgcagcgctcaagacagcttttacgcatattcaaagcgtatctgtcaatagtgatgttatgattacggttgatagtgatgggcaacatttaattaaagatattgtcaaagttgcacgtgcgacgcaacatcatccagaaagcatcgtccttggtgcgcgtgcttttgtcggaaaagtgcctgctagaagccgttttggaaataaagtaaccgctaaacttttccgattagtgacaggagtagccattactgatactcaaactggcttacgtggtttatcgacagaattaatcccttggctgttatcgctaaaaggcgaacgtttcgagtatgaatttaatatgttgcttgaagcggatcagagcggctatgacattcatgaagttccaatcgaaacggtctatatcgaagggaacgaaagctctcattttcgaccaattcaagattctattcggatttacagcccgtttttaaaattctctggcgcgtctattttggcagcgatagttgatgcattagcattatttacgctgatcgctttaactaaaaatctcttaatttctgttattttagcgcgccttatcagtgcaacaacccaatgcttactaaatgcaaatcttgttttcaatcgaagtaatccactttcgatctcgattgttcggtatttcttattagtcgctgtcattttgacttgtaattattttatgttaaaagttctgattagcattggacttggtttaattctctcaaaacttttgaccgagacaatcctctttatcctaagttatcgtgttcaacgaaaatttgttttcaattaatttaaaattatttttctaaatttcataaacataagacacgaacattaatatttattctaagaaataacgtgcgtttttgaaaaagtatgttataatatttttattaatcattaactaactagaggagaatcccgtgaaatctgatatcgaaattgcacaaagtgtcgaactcaaaccaatcacagaagttgttgaaaaagtcggtattacatttgatgatattgaactttatggtaaatacaaagccaaattatctttcgataaaatcaaatctgttcaagaaaataaaccaggtaaattggttcttgtaacagcgattaacccaacacaggcaggtgaaggaaaatcaacaatgtcaatcggtcttgctgatgctttaaataaaatcggcaaaaaaactatgcttgctttgcgtgaaccatctcttggtcctgtcatgggaatcaaaggtggagcagcaggtggtggttacgcccaagttcttccaatggaagatattaaccttcactttacgggtgatatgcatgcgattacgacggcaaacaatgccctttcagcaattatcgataatcaccttcatcaaggaaacgagcttggcattgaccaacgtcgtattatttggaaacgtgttgttgacctcaatgaccgcgcccttcgtcatgtcacaattggtcttggcagccctgttaacggtattccacgtgaagacggctttgacatcactgttgcctcagaaatcatggcaatcttgtgcttagcaactgatatcaacgatttgaaagaacgtttggcaaatatcgtggttgcttaccgctatgaccgtacaccagtttacgttcgtgatcttaaagtcgaaggtgctttgacacttatccttaaagacgctatcaaaccaaaccttgttcaaacgatctacggaacaccagcttttgttcacggcggaccatttgccaacattgctcatggttgtaactcagttcttgcaacagcaacagcgcttcgcttagctgattacacaatcacagaagcagggtttggtgctgaccttggtgctgaaaaattccttgatatcaaaacaccaaatcttccaacaacaccagatgcggttgttattgttgctacaattcgtgcccttaaaatgcatggtggcgtagctaaaacagatcttggcgaagaaaatgttgaagcggttcgcactggatttgctaaccttaaacgtcacgttgaaaatgttcgtaaatttggcgtaccagcagtcgtagcaatcaatgaatttgtcgcagatactgaagctgaaattgctgtgcttaaagaactttgcgctgaaatcgacgttccagtagaacttgctagcgtttgggcaaatggggctgacggcggtatcgaccttgccaatgctgttgttaatgctgttgaaaatggtaatgccgattacaaacgtctttattcagatgaagattctcttgaagaaaaagttactaaaattgtgactgaaatctatggcggtgacaaagttatctttggcaagaaagccaaaacacaattgaaacaatttgcccaattcggctgggataaattgccagtttgtatggctaaaacacaatacagcttctctgataaccaagcactcctcggagcaccagaaggttttgatatcacaatccgcgaatttgtaccaaaaactggtgcaggcttcattgtcgctctcacaggtgatgtgatgacaatgcctggtttacctaaaaaaccagctgcacttaacatggacgtcgctgaagacggcacagctatcggattattctaaaattaacatagtcaaaaagtcaacctcggttggctttttttagttatggtttttcaataggaaaacgaggtggaaaatatgatataatggttaacaagaacagatgaacatggaggttatgattatcgaaaataaaaacaaagataaagctatgcgcttgttggacaagagccgacgtagttttcttcgagggatttttagtcgaacaaccgttatctctgttctcttgatactgcaactatttttcttgatagcttcctttgcttggcttgatcaataccgcatttggatggaaattatcgagcgtgctttggctattacagctgttctgtatttggtaaatagtgaaatggatgctctctcgcgcgtcacatggctgattttggttatgattgcgccattattggggtcactttttctcatttatactaaacttgactggggctatcgtgggctcaagcaacgaatgaacgaattggttgatagcagtgctaaatatttgccagacaatcaagagattttgaaagttttaaaaggtaacacatcgacgacctatcatttggtacaatattttgaccgcagccgtggaaatttcccagcttatcaaaatacagaggtcacttattttccgattggcgaagctttttttgaagaattaaaaaaacagctacttaaagccgaaaagtacatttttatggagtttttcatcatcgccgaaggagttatgtggggggaaattcttagtattctcgagcaaaaagtgaaagaaggcgttgaagttcgtgttctttatgacggcatgattgaattttcaaccttgtcttttgactacacacaacgtttgaaaaaactaggaattcaagccaaggcattttcaccgatttcaccatttatctcgacttattataattaccgtgaccaccgaaaaatcattgttatcgacggtaaagtcggcttcacaggtggcgtgaatttggcagatgaatacattaataaattagaacgttttggtcattggaaagatactgcaatcatgcttgagggcgaagctgttaacagttttgtcgtgcttttcttgcaaatgtggtctgtaaccgaaaaagaattggttatcgaaccttatctagttgaacatgataaatcaaggcgtgccaacggctatgtcattccttacggggattctcctttggataccgacaaagtaggagaaaatgtttatatcgacatcctcaaccacgccagagattacgtttatatcatgacaccttacctgattttggatagtgaaatggagcatgctatctgctttgcggctgaacgtggtgtagatgtccgaattattatgccaggaattcctgacaaaccaattccatatgctctagccaagacttatttcagcaaactcatgcgctctggtgttaaaatttacctttataaaccaggttttgttcatgctaaagtctttattagcgatgatagcaaggctgttgttgggacgattaaccttgattaccgtagtttgtatcaccattttgaatgtgctacctatatgtacaaagttgatgccattcaagatatttataaggactgtatgcaaactctaaaagactgcaaacgtgttacccctgaaatggttaacaaccgcccagcacacgaaaaaatcatcggactccttgtcaaaaccatcgcaccgttgatgtaggagtaactctttgcaaatcttactatctgtgatatactagttgcatgcgatgagccgaattaactcaatttgagagtttatttgcgcagaggaggtcattctagttcgactagaaacgcaggagcggactttgacaatttgtgtgaacctttttgtcacactcgtttgagtgcctcgtttccctactttttggtagggatttttttgttgtcaaaatatttttaaaattaagtaaaattcagtcttttcttttacctcaaaaaattgtataatgtatctactataattttttagaaaattgagaatagtacactatttttcaggaagaggtattgaaatgggctatacagtcgctgtcgttggtgccacaggcgccgttggaactcgcatgattcaacaattagaacaatcaacactccctattgacaaagtacgtcttttgtcatcttcacgttctgctggaaaagtattgaagtataagggacaagatgttactgttgaattgacaaccgaagattcatttgaaggcgttgatattgctcttttctctgcaggtggttctgtgtcagcaaaattcgctccatatgctgttaaagcaggagcagttgttgtcgataacacatcatatttccgtcaaaatccagatgtgccacttatcgtacctgaagtcaatgctcacgctttggatgctcacaacggtatcattgcttgtccaaactgttcaactatccaaatgatggttgctttggaacctgtccgccaaaaatggggcttgagccgtattatcgtctcaacataccaagccgtatctggtgcaggtcaatcagctattaacgaaactattcgtgaaatcaaagaagtagtcaatgacggtgctgaaccaaaagatgttcacgctgatattttgccatgcggtggtgataagaaacacttcccaatcgcatttaacgctcttgcgcaaattgatgtctttactgacaatgactacacttacgaagaaatgaaaatgacaaacgaaacgaagaaaatcatggaagaaccagaccttccagtttctgcaacttgtgttcgtgtgccagttcttttctctcattccgaatctgtttacatcgaaacaaaagaagtagcaccaattgaagaagttaaagcagcaattgctgccttcccaggagctgtccttgaagatgatgttgctaaccaagtttacccacaagctgctaatgctgttggcaaacgcgaaacattcgttggtcgtatccgtaaagacttagacgttgaaaatggtatccatatgtgggttgtttcagacaaccttcttaaaggtgcagcatggaattctgttcaaattgctgaaactctccatgaacgtggtcttgtacacccaactaaagaacttaaatttgaactcaaataatcataaataactcaagccagtttcctaggagactggtctttgagcatatttactgtaaacaaatccctaaatctcacacaattaacagaataggagattactatggctattgaagatttaagaaatgtaaaaatcatcactgcgatgattaccccatttaatgccgacggatcaattaattttgatgctctgccaaaacttgttgaacatttgcttgctcaccacactgacggaatcttgttagcgggaacaactgctgaaagcccaacactaacccacgatgaagaattagagcttttcgctgctgttcaaaaaatcgttaatggtcgtgtgccgttaatcgctggtgttggtacaaatgacacacgtgattctatcgaatttgcgcgcgaagtagctgcatttggtggctttgctgctggtcttgccattgtgccttattataacaaaccgtctcaagaaggtatgtatcaacattttaaagcaattgccgatgcgagcgagcttccaattatcatttataatatccctggtcgtgttgttgttgaaatgacaccagaaaccatgttgcgtttggctgaacacccaaatattattggtgtgaaagaatgtacaagccttgctaatatggcttaccttatcgagcacaagcctgatgatttcctgatttatacaggtgaggacggcgacgctttccatgcgatgaatcttggggctgacggtgttatttctgttgcctctcacgttaacggtgacgaaatgcacgaaatgcttacagcgattgaaaacagcgatattaaaaaagcggcagctatccaacgtcaattcattccaaaagtcaatgcattgttctcttatcctagtcctgcaccagtcaaagcggtgttgaattaccttggatttgaaactggtccattgcgtttaccattggtatcatgcccaccagaggatgcgaaacgcattatcgacgttgttattgacggtaatgttgaagctaccaaagaaacagtcacaggcgttttgcgtccagattattaatgtaaacataaaaatcctcagaaagctaaatttctggggattctttgcattatcagaacttaaattgtttactgaatagattattttgcaataatatttagcgtttctgatagatgattatcatttggaatttggataaaacgcttttgaggagttgtcagataactattttctaaataattgattttattggtaaatttgagttctcctaaatgtctatcttgtggcaattcaatcagaaggtgctggagcgatgcgctgtaatgctgaatatttggaaattgtgagagaagcacggtcgttttagcgacttgttcatgaaatacctgactcagataattcagatttttttcaaacatgccactatccaaatagagagacaaggctttttgcataatgagattggtgtcatagtcaatcatttttttgtgttctagaaaagcttgcattagtggctgaggaagtacaattgtcccaagacgcaaagctgggaaaatggtcattgaaaatgattttaagtagataacatgacctgacgtatcataataatgcaagggtaaatccgttgatttcgtgaaatctcccatgtaatcatcttcaatgatgtaaacgtcatatttttgagctaattctacaattttttgcttttcagctggggtataagatagtccgagcgggtttgaaaatcgtgaaatcgtgtagaaaaacttgatgtcttgcgttttaaacaatcgttctaatgccgtcaaatcaataccgttaaaattacgctcaatcgtctggtaaggaagattttgtgaagccaccaaatcaatcatacggtgataagtcggctgttctaagagaatcgttgtctttttatttggaaatgaaacttgtgaaagaatataaagtgcttgttgggttcctgaagtgactaaaatatcgttttccttagcataaatagcccctttttccaagtagttttttaaggatagaatcaattcttgcaacccttgttgttgatagtagtagttaaaaaggtaattttcgcgattaactaacgtttctgtcaaacatgtcgtgaaatcctcgtacgccatgttattatattcagtcaaactcaaattaagtggctcttctttttgacttttgccttcaagaacataataaccgctcttgttgacagcatagatgtaatttttaaatttgagttccaagagtgcccgttgtaccgtgtctttgctgcaatgatagctttgactaagggtacgaattgaagggattttatccccattttttaagattccagattcgatttgttctacaatagccgtcatgatttcttgatttttacttgtcatagactgtccccatacagtttttaattgtttctattgtattataaattgaattttcttacaatatttttaatctcttaatctaaagatatcgctattttagagaaaagattagaaagttgctttttatgaagaatcctacaaagtcagttatcgttgccaatgatattgtcggtttgggcaaggtcgccttgtcaacggccttacctgttttgtcagcttgtcagattgaggtcattccgttgccaacagtgcttttatcgtcgcatacaggtggtttcgaaaatattagtattacagaattgaatcaagcgacaacaggctttttaacccagtggagtaccataaatttttctgttgatggcttgatgactggttatttcaactctcaaaaacaattgcatcaaatagcagaatttgctaagcaaagaaaactggtacgttttgttgaccctatcatggctgacaatgggcgtttgtatacaggctatcagcaagattttgtgaccgtcatgcagcaattttgccagaatgctgatgtcattacgccaaacattactgaagcttgtttactagcagatgttccttatctcggtgaagattatacaagaaaagatattgaagaattgcttttaaggctagaaaaatttcataataagcacgtgattttaacgggtgtttctttcgaagcagggcaaatcggattagcacatttcaatcaacagagcggcagcattacttatcatatgtctaaagcttatccgcaccatttttttggaacaggtgatttattgtgtgctgttttgggagctggttattttcatggcttatcattggataaaacagcagaagtagcgcttgattttattgataaaaccttgcaattgactttagagttgaaacgagatttgaaattaggactttgttatgaaccttatttattggatttagccattcaaatgaagcgcttgaaggaggaaaaagaatgaaacatctcactacacgtcaacttgtcgaattaagcttatatgcggctttaattttcatcagtgtccaatttttgcgtattcctcttggaactcaatttgtccatttcggaaatgctttagtggttgttgctgttttactttacggttcacgattaggtgcgctagtagcagctatcggactaggtttattcgatgtgttaaatggatacgctgcagaagtttggatcaccatattagagtctttgatagtttgtctggttcttcattttgtgtttgaaaaattaatgcactctgatgataaaacgcgcaacgttatcattgttgggatagttgcagcgataacaaaaattattagtaatcttgtcaaatacacgattatcaatagcattgtcggtggtctccagtttcaagtcgctttcctagcagccttggttaaaatcggtggcacattcggttcagctctggtaacgattatctctgttccaattctctacccaattctcaaacaaatcttttcacatcacgcacaacccaaaaccatttctgaatgatttttcaagctcttgttcaagagcttttttacttactgaaaatcaacgttttcataaaagaaagcattgatttaggctttaaactcatgctataattgaaaagattatttgaaaattaggttgctagcgtagctatttcaataaaaaacgaatgaaagtatataagtaatgagtattttagaagttaaacatttaagtcatggttttggtgagcgcacgatttttgaggatgtctcatttcgtctgttaaaaggggagcatatcggtcttgtcggagcaaatggtgaaggaaaatcaacctttatgagcattgttactggtcatttgcagccagatgagggaaaagtagagtggtcaaaatacgtaacggctggttatttggatcaacacacggttcttgaggcaggaatgagtgtgcgtgacgttttgcgaacagcttttgatgagcttttcaagacagaagcacgtatcaacgagatttatatgtctatggcggatgatggcgctgatatggacgctttgatggaagaagtaggggaactacaagaccgtctggaatcacgtgatttttacaccttagatgctaaaatcgatgaagtcgcgcgtgcccttggtgtgatggatttcggtatggattctgatgttaccgaactttctggtgggcaacgtaccaaggtattattggcaaaactgttgcttgaaaagccagatatcttacttttggacgaaccgactaactaccttgatgccgaacacatcgaatggttgaaacgttatttacagaattacgagaatgcctttgtcttgatttcacatgacattccattcttaaatgatgttatcaatatcgtttatcatgtggaaaatcatgatttggtgcgttatactggtgattatgataatttccaagctgtttatgccatgaaaaaagcacaattagaagcagcttatgaacgtcaacagaaagaaatcgcagacttgcaagattttgttaatcgtaacaaggcgcgtgttgcaacacgtaatatggcaatgtcacgtcagaaaaaattggataagatggaacgcatcgaattacaatctgaaaaaccgaaaccctcttttgaatttaaagagtcacgtacaccaagtcgtttcatcttccagacacaagatttagaaattggttatgaccacccattgacaaaaccactcaatctcacttttgagcgcaatcagaaagtggctatcattggtgccaatggtatcggtaaaacgactttgctgaaaagcttgcttggtattatcccgccaatttcaggtagtgttgaacgcggcgattatatcgaacttggttattttgaacaagaagttgtagcaggaaaccgccaaacgccactggaagctgtttgggatgctttcccagcgctcaatcaagcagaagtccgtgcagcacttgcacgttgtggattgacttcaaaacacattgaaagtcaaattcaggtgctctcaggtggtgaacaagccaaagttcgcttctgtttattaatgaatcgtgaaaataacgttcttgtccttgacgaaccaaccaaccacttggacgttgatgccaaagaagaactcaaacgtgccctaaaagcctacaaaggaagcattctcatggtttgtcacgaacctgatttttacgaaggctggacagaagtctgggactttaacgaacttatgtaacatatagaaaaagagacagtgcgtctctttttttgattttctgaacaaattctgaaaaatataatgtacattatcagtgaaagggaggaaaataatatgcgagtcaaagtgacaaatcttcaaaaatcatacaaaggccgagatattttaaaagatatttcttttaccattaaatcaggaaccatttgtgggcttttaggggtcaacggagcgggaaaatcaacgattatgaaaattcttttcggtctagaaaagccaagttcaggaaatatattgtttgatgagaaaacaccacaagaaatcaaaaaatctgatgaaaaattaggagcgttaattgaatcgccagccatttatatgaatttatcagcatttgagaatttaaaaacgcgagctcttctttatgatattcctgattcaaaaataaaggaaacacttgctttaattggtttagctgatacaggacgaaagaaggcaggaaaattttcgttgggaatgaagcaacgcttagggattggaatggcaattatcacaaatcctgagtttttgattttagatgaaccaaccaacggtttagacccagatggtattcaagaacttttagaattaataacatcactaaagagacaaggaatgactattctgatttcaagtcatcaattgcatgagattagtcaggtggcagatgatatcatgattttacacaacggagaaattcgttataatcagccaaatcatcatcaagatttaggaaatctattctttactatcgttcacggaggacattgaaaatgaataaagttttacaatcagagatgttaaaacgtaaaaaagggatttatggtaaattgtgttttattattccacttatctctgtctttatcgcattcttactttgtggtccctctcttttagaaagtttttcgatttattggtgggaagctttgtttctttttacattgattgggttattttttacttatgaccagaaagaagaagagggagcagggcattttcagaacattattcttgggcagctaacctatcgtattcaaatcgcaaaaatcattttaacggttaaagaccttatccttgcaagtcttttctttcttttgattttatatctggtttcaattctttttagtggaataatgacgttaaatatcattcatgatatagaggtacttttctttattttagtagcttcactttggaatattccaatgctatattatctgtcaacatgggttaataattatgtattgttagtgctgaatgccttggcctgcttattattagcgccatttttagcacaaacttctttttggtatctctttccatacacttatcactataaaatctcacaagttctcattcatttgaaaccctctggggatttagaaaacttaaatgtttctcaccctttttcggtgctttttatcgctagttttttatctataattctattcggattatttattaaattattacgggaggaaaaacgtgtttaaagctttcaaaagtgaggtgttaaaactaaaacattcatttactttatatcttataagcggtgtttttgtagtcgaattgcttacagttcccgcatatcttgctataagccgtaatgtctatgctactcaagcagcaatttattttccagtgatgggatattgtttattgctgtctattgtggctcttcaaacgtttgaacaagaagaaaaagccaatcattggcaaaatgtcaattgtactcagaaaaggctaaaactatggataagcaaattggtgactattgattttctgctctttttaccaagtgtactactgtggcaactgattggagtagtagtgaaccagaccgtctatgctaattacgtaggctttgtgacgtggcttttattgatatttcttaatcattttcatcacttattactgacgatattttctagtagaaacctaactatcatcgttgcctttgtcgaatgtcttttcatcctttttgcttcaaatggtgtctttgtaaattatttttggataccgatagccttgccagttaacgctattttagcttatggaaatagccgagcaacacagattatctgggcattgatagggtggattgtcgtttgtgtcattttcaacgttataacattaaaaattccgaaaaatcactcataaattaaccttttatagtaaaataaaaacaaatacatacgaggtgaaaaagttgtataaagttttagttattgatgacgattttgaaattttaaaattaatgaagaatatccttgaattgcagaatttttctgttacaacctatcagaaaatagaactgcctattagattagctgattttacaggatacgaccttattttacttgatgttatgatgcctgatatagatggaatggagctatgccaaaccattcgcaaccatattacaacaccaattatttttgttagtgcaaaagatactgaaaatgatattattaaagggttaaatcttggcggtgatgattatatcactaaaccttttagcatcaaacaattagttgctaaaattgaagcacatttaaaaagagaagaacgttccaagcaagcccaaaaagcttttcaagaatttaaacgtgaattttcatcaattacagtatatcttcaagaaaagagaatttgtgttaataaaaatcaagtcctgctaaccaatcgcgaatatgctattttggaattgctatctagccaacctaaaaaagtgtttacacgtgagaatatttacgaacacgtttataacgatgattcggatactttgtttaggtcgatttcagaatatgtttatcaaattcgtcaaaaattttcagtttacggtattaatccgataaagacagtcagaggagtagggtatcagtggcatgactaaaaaactaaagataaaaaacctaagacaacggatattacaaaccgttatggaaatcattattggaatcattctagtgacaatcagcatttttatcataaccgatatcttggcttataccaatcaaatcacttctgctagcaatcagttaactatcactatttctgataaagcaagtaaaaatgatattatccaagaaatgaaaaacattccttatgattatatattatatgacaagaattcaggtaaaatcattaaccaaacgaatgtttcaaacgattttacaaattatcaaaaagcgtttgaaaccaagcagatcgtcaacgcaagtgacggtgttgcctatatcaacgttgaaaatactaattattcattaattgtcagaaaacctagtattccagaatttgcgaatcatacattacggcatatctcctataattcattgacctacataacctttattgttggtatttttcttgttcttatctgggcaattactagattactgaaagagtttgctaaaaatttctatcacattcaaaatttagtattaaatatgggaaacttagcgttatcggctccgttaaattcttctgatattgctgaatttgacacgattttaaccattttgtcacaaaaaagcgatgaattggctgaattgattgaaaaagaaagaaatgagaaaaaggatttatcttttcaaatcgctgctctggcgcatgatgtaaagacccctttgacagtcattaaaggaaatcttgaattgctagaaatgacatcacttactgaaaaccaacttagttttctcacctctattaataacagcatcatagtatttgaaaactatttcaatgcgatgttaacttacagtcgcctacttagtgatgaaaataatgacaaagaaacgattcatctagaaatatttttgaccgaactttctagagagatacaagatattttaaagccgacaacaattcaatttacgctaaataatcaagctcaatgtagctattttttaggaaatcaattaaatcttaatcgtgcgttagtcaatatctttgttaacgctgttcaacatgcaccaaatggcaaaattcggttatcagtcgaagagagcgacaaccatttgaactttaaaatttggaataatggtgctccattttcagctaaagccctgaaaaatgcagataaattcttctttacagaaaacaacggacggagtgacaaacattatggtattggactatcttttgctaaagctgttgctgaaaaacatcacggaaaactaacactttgcaatcctgaaaaaggtggagcagaggttgtcttgtcaatttcaacaaattctcccattcgcgactaaaaaatgacattttacgacttgggtgatgagttgctcgctaaaattggtataataaacaaaaaaatagatattaattagatttagtattttaatactagatttgttatatgatttaaaagggggttatcttgctcagaaaattaatcgctgctggtatttttctggcatttggcatacgagccattatatcaacaacgggaacactcgtcagattatttttggtcgtttcaacgttggttcttgtgaaagctatttttgaagcaaaggaaggaaggtaatacgatgaaaaaatcaacacaaacagctatttttttgacattattttttctcattttgtgcctacttaattttcaaaaagaattatccactctgaaattaatattaaacagtattgggttaatcggtttttcaattttattttttacagctgttaaaaaagaaagggggagcgataatgaaagctctttataaagggaaagttgctaccgtctggcaaatcagtcaagataaatctgcacagcctgattgggtaaaagacgcttttgctaaaggttacttgcattggttagacaaccatcttcgtattttaatggcagggcttaatccttcgactactgaaaatctaaaaacaggagtagtaggaagtcttggaggcggctttgcaggatatggtatgtatgaactgggttatatcggtgattatcttgatattactaatcatcgcgtaatatccgaaaaaacgtttgaaaggaactatcaaaccattgattaataatccaattacgtttattctgaaacatcgaaaattggtgttactcctatggctttcgtactgtttattgattttaggaattacctacttagaatttcatcaaagccgtgaatggttttatatcttacactatctaagcctaatgagtattccaatactacttttacaaataaaaaaataatcccctgttttaaatacaggggcgttttttactctttatttttgataatattttcacaacggtcaactaacagagcgaagcggtcttcggttaatttttctttattataaatgccagatgtcgtttcaaaagtgaatttttctgaagcaagttcttttgatgtggcgtgataaatacgccatttatctttgtgatttgaaacggcaagcagagcttcaagaaccaaaacaaggcacgaagcaatgacagcaagcaatttaaagcaaggaattggaaggcttgctaaaatcggaacaagcgccaaaacaatgatttgaatcaccttaaaaacaataaaccatgcacggtgaaagtggctctttttctcgtaagcagcaatttctttagttaaacgttccgccaagtaagtttcaatcgtcatttcagtataatcgttcatcttatctcctttagtaagccttttaatacgttttcattgtatcgccttggcaaaagatagtcaagaatgaatagatttttctctttatgacaatagctgcgcggtaagcttttccccataatcagaaatagtttatggtataatagaaaatgatttgataattgcttttaattgcaataaaaactaaagaatgataataaaatataagttttaacacttatcgatgaaaggaatttattttacatggctaatatccaatggtttcctgggcatatgtcgaaagcacgccgacaagttcaggaaaatctgaaacacgttgattttgtaacaattttggttgacgctcgtttgccactatcaagccaaaatccaatgttaaccaaaatcgtcggagataaaccgaaattgatgattctgaacaaagccgaccttgctgatagcaatcgaacaaaagaatggcgtaactattttgaaaaacaaggcatcaaaaccctagctgttaattcaaaagaacaagctactgtaaaattggtaaccgatgccgccaaatcattaatggctgataaattagctaaattacgtgaacgtggcattcaaaaagaaaccttgcgcacaatgattatcggtattccaaacgctggtaaatcaacattaatgaatcgtttggcaggtaaaaaaattgcaattgttggtaataaaccaggagttactaaaggacaacaatggcttaagtctaataaagacttggaaattctagataccccagggattctttggccaaaattcgaagatgaagtagtaggactcaaactcgccttaacaggtgctatcaaggaccagcttttgccaatggatgaagtaacaattttcgggcttaatttctttaaaaaatactatccagaacgtcttgttgaacgcttcaaaggtatcaacttagaagaagaagcgcctgagattattatggctatgacacaaaaactgggctttcgtgatgattatgaccgtttttacagcctttttgttaaagatgtccgcgaaggcaaacttggtcgttacactctggatgttgtaggagaagttgaaaatggcgaccgttaaagaaatcaaagaagcgctagcagcgattgagagccttgatgacgcacgctggcaagattatgagtcagatagtcgtgcaggtgtccaaaaggtgattcagcagcgtaaaaaagccattcaggcggatattgatgaggacttgcgcttggaaaatatgctgcgctacgaaaaagaactttatcaacagggttaccaagccattgctgggattgatgaagttggtagaggaccattagcaggacctgttgtcacagcgtgcgttattcttccaaaaaattgtaaaattaaacacctcaatgattctaaaaaaattcctaagaatcaccatgaggaaatttatcaagaaatccttgcgcgtgctctaggaattggaatcggaattgttgacaataatgtcattgaccagattaatatctacgaagctacaaaagtcggtatgttgcaagccattaatcaactgaaaggtgaggtgacaaaacctgattatcttttaattgatgccatgcatttggaaacttcgatcccacaacaatcactcatcaaaggtgatgccaactccttatcaattgcagcggcttctatcgttgctaaagtaacacgtgaccgcatgatggctgactatgccaatgattatcctgggtatgcctttgaaaaaaacgttggctatggaaccaaagagcacttagaaggtctaaaaaaatatggcatcacaccaattcaccgtaaaacattcgaaccaataaaatccatgctaaaggagccttaatatgacaagcgaaaaagaaaaaatgttagctgggcaactatacgatgctggagatgcagagctaactgccatgcgtctggaagcacgccgaaaaatgaagttgtttaataacgaggacgaccgtgataagcaaagagaaattataaaaactctgtttgggtcaacaggtgaaaaattaacaatgaatccacgttttgtttgtgattatggttcaaatatttatgtgggtgagaatttctatgccaattataactgtaccatgcttgatgtctgtgagattcacattggcgacaacgcaatgtttggaccaaattgtcaattgttaacaccgttacacccacttgatgccaaagaacgtatttcaggtcttgaatacggtgcaccaatcactattggagataatgcttggtttggcggcggcgtgaccattctacctggggttaccttaggagacaacgttgtcgttggtgctggcgcagtcgttacaaaatcttttggcgataacgtggttctcgctggaaatcctgcaaaaatcataaaaacgcttgattaatacgtaaaatacactcactaagccctgtttttcagggctttttttcgaataataaattagtgaggtagaaaacatgaataattttgaattgtttaaattaaaaaaagcaggattaacaaatcttaatattttagctattttagattatcaagaaaagcaagagaaatcactatctttgcgtaatatggcagtcgtctcaaaatgtaaaaatcctatcctttttatggaaaaatacaaagcactggacaccaaagaattgcgcaaagaatttaattgttttcctagtgtttccatactagatgacgaatacccattagaactcaaacattgttataatccacctgttttgctgttttatcaaggaaatttagaattactcaatcgccaaaaaatggcagtagtaggagcaagaacagcatcagcaacagggacaaaatccgtacagaaaattgtcaaagaactcgggaatcattttgttatcgttagtgggttggcgcgtggcattgataccagtgcgcatttatcagctctaaaaaacggtggtgcatcgattgccgttatcggttgcggactggacgtttattatcccaaagaaaataagcagttgcaggcgtacatggctaaaaatcacctcgtattaagtgagtacgtagcaggagaagcaccgctgaaattccattttccagagcgaaatcgtattattgcaggtttatcacaaggcgttatcgtagtagaagctaagctgcgctcaggcagtttgattacgtgcgaaagagcattggaagaaggacgagacgtttttgccattccaggaaatattttagatggaaaatctgatggctgtcatcatttgataaaagagggcgcaaaatgcgtcacatcaggcttagatatcctttcagaatatcaaatataagcaagttttttctattaaatacaacttttttattgacagtttaagaaaagcgggttatcatgttataagtttattactgataggaagtgagcttatggcaacgacgactactacgaaagccccaacagctgttaaaaaatcaagcaaaaaaacgacaaagaaaaaaacagctgccaagaaaaatttggttattgtggaatctccagctaaggcaaaaacaattgaaaaatatctcggacgtaattataaagttgtagcctcagtaggacatatccgcgatttgaaaaaatcaagcatgtctattgattttgaaaataattatgaaccacaatatattaatattcgtggtaaaggtccattgattaacgaccttaaaaaagaagcgaaaaagtctaaaaaagtttatctcgcaagtgacccggaccgtgaaggagaagcgatttcttggcacttagctcatattttggaccttgatgaaaacgacaaaaaccgtgttgttttcaacgaaatcaccaaagacgctgtcaaaaatgcctttgttgaaccacgccaaatcgatatggatttagtagatgctcaacaagcgcgtcgtgttcttgaccgtatcgtgggatattctatctcaccattgctttggaaaaaagttaaaaaaggtctttcagcaggacgtgttcaatccgttgcattaaaactaatcattgaccgtgaaaatgaaatcaaagcctttaaaccagaagaatactggacaattgacggtttctttaaaaaaggaacgaagaaattccaagcttcattttatggcattgatggtaaaaaattaaaactcgaaacgaacgaagatgttcaaaaagttcttgctttattgactagtgacgaatttaccgtagctaaggttgaaaagaaagaacgtcgtcgcaatgcaccacttccttatacgacatcatctctccaacaagatgctgctaataaaatcaacttccgtacacgtaaaaccatgatggttgcacagcaattgtacgaaggtatcagtcttggtaagagcggaacgcaaggtttgattacctacatgcgtactgactcaacacgtatcagtccaattgcgcaaaatgatgccgcaaactttatcacagaacgtttcggtgaaaaatactctaaacacggtagccgtgttaaaaatgcttcaggagctcaagacgctcacgaagccattcgcccttcaaatgtcaatctaacaccagaatcaatcgctaagcacttagataaagaccaattaaaactttacacattgatttggaatcgttttgttgccagtcaaatgacagcagcagtctttgacacaatgaaagttaacttggagcaaaatagcgtccgctttactgccaacggtagtcaagtaaaatttgacggttacttagccgtatataacgattctgacaagaataagatgttgcctgacatggttgaaggtgatattgttaagaaagtgtcaacaaatcctgaacaacactttacgcaaccaccagctcgttattctgaagcaacacttattaaaacattggaagaaaacggcgttgggcgtccgtcaacttatgcaccaacacttgacgttatccaaagacgttactatgttcgcttagctgcgaaacgttttgaacctacggaacttggtgaaatcgttaataatttgattgttgaattcttccctgatattgttgatgtcaaatttaccgctgatatggaaggtaaacttgatgaagtcgaagaaggtaaacagcaatggcaaaaagttatcgatgaattttacaaaccatttgaaaaagaacttgccaaagccgaaaccgaaatcgaaaaaattcaaatcaaagatgagccagctggctttgattgtgatgtttgtggacacccaatggttatcaagttggggcgttatggtaaattctacgcttgtagcaatttcccagagtgtcacaatacaaaagcaatcactaaagaaatcggcgtgacttgtccagtctgtggcaaaggtcaagtaattgagcgtaaaaccaaacgtaatcgtattttctatggttgtgatcgttatcctgaatgtgaatttacatcatgggataaacctgtcggacgttcttgtccaaaatctggagacttcttggttgagaagaaaatccgcggtggtggtaaacaagtcgtctgcagcaatgaagaatgcgattacgaagaagcaaaaattaaataaaacgatagaagctgaagcagagatgctcagtttctttttgattgtatgggaaatacattttccgttataatggactttttaaataattgctgttataacggactttttttgataagtctgttataatagacttatgagaggtacgctatgaattattttgcattaattggagatattattgattccaaaaaaatcgataatcgttaccaagtccaaaaaacattggagacttgcctaaacgagttaaatattgaatttaaagatgtcttggtttcaaaattatctatcactttaggcgatgaatttcaaggattgttaaccttggacgcccctttatttcagataattgaccgtattaacttcgcaatgcagccttatcaagtacgttttggtcttggtttaggaaaaattctgacagatattaacccagagcaaagcattggcgctgacggtcccgcttattggcacgctagaaaagcaatcaattacatccaccaaaaaaatgattacggcaatacgcaaatcgctgtttcctttgaagatgataccaaggtaaacattattaatacactgattgccagtagcgaagcaattaagtccgattggcgcgctagccaagaaattatcttgcaggaacttttgaaacttggcatttatgatgagcattttgaccaacaaattttaggaaaacagctcgaattaagcacaagtgcgctgtcaaaacgattgaaaagcagcaatatcaaagtttacctacgaacacgaaattgtgcgttaaatctgcttaaaaacgctggagaggagttaaactaatgtcaatcacaggtctttctcactatcttagccaaaatcctatattaaccctgttactgatttgtcactttttgtcagactttcagttgcaaagccaaacagttgccgaccgtaaaaataccgataaaacttatcttttgattcatctcatttgggtagctgttccgttaattttggtaactatttttatcccaagcatctggggcattagcttgcttattttgctgagtcattctattattgactttggaaaacctcatgtggctaatagtttcaagctaaatccgttggtaactttccttttggaccaaatgttacatctgggaattatacttttacttgccccgcttgctaaaggagtatttctgccaaatttcctaacaggagaagcgcttaatattatcctgtttatcgtcttgattacaaaaccaactaatgttatcttcaagattttctttcaaaaataccagccagagaatagtcaaaaaatggacaccattccaggtgctggagcaacgattggacttttggaacgtattgtgatgagtatttgtatcattttcaatcaattcgcctcaatcggacttgtttttactgctaaatcaatcgctcgttataataaaatctccgaaagccccacatttgcggaatactatctcattgggtcacttttcagcattttaagtgttttactatctgcttggatttgtttgttttaaatgaggatgactgactatgcattttggcttctcttatgttggattcatctttttaatgctactaatgataccaaatcttatttggacacgaaacaaacctaaagattatgaacattatcagtatcaagaaaataaatacttatccttacttgaacgtatcggagaagtacttgtgacttgtctgattctcatcttttctgattttaactggcagccctggactaattggaattggtggttgatagctgctagtttttgtatgattctttatgaaatgttttggattcgttattttatgggaccaaaaagaatggcagatttttacaccacatctttaaaaattccagtagcaggagcaagtttgccgattttggcagttctatgcatatccatctatggtaaaaatccatttctgaccttggcatcaattattttgggaattggtcacattggtattcacttacaatatcagaatatgattaaaaaggataatcaataactcgtttacatatttttatttatgtaaataaactatataatattatttgagtttcacaaattttatgttatgataatcaagtatcaaaattagaaagatttggataagggctttctcccttatctggaaaatgagttttaggacttcctaagcttgtttttggaggtattagtatattgtctcaatcatcatacattaacgttattggagctggtttagcgggctctgaagctgcatatcagattgctaaacgtggcattccagtaaaactttacgaaatgcgtggtaagaaagcaacaccacaacacaaaacagataaatttgcggaattggtctgctcaaattcgctgcgtggtgatagcttaacaaacgctgtcggtctgcttaaagaagaaatgcgtcgtctagactctgttatcatgaaggcagcagaaagcacgcgcgtccccgctggtggtgctttagcggttgatcgtgacggtttctcacaaatggtgacagatgaagtgacaaatcacccacttatcgaagtcattcgtgaagaaatcacagaaattccaactgatgccattactgttatcgctagtggtcctttaacatcagatgcacttgctgaaaaaattcatgaattgaacggtggcgacggtttttatttctatgatgccgcagcgccaatcgttgataaaaattctatcgatatggacaaggtttatttgaaatcacgttacgataaaggagaagctgcctatcttaactgtccaatgaccaaagaggaatttatggcgttccatgaagcgcttgtcaatgccgaagaagctccgcttaatagctttgaaaaagaaaaatattttgaaggttgtatgccgattgaagttatggcaaaacgcggcattaaaacaatgctctatggtccaatgaagcctgttggcttagaatacccagatgactacaaaggacctcgtgacggtgaattcaagacaccatatgccgttgttcaattacgtcaagataatactgctggtagtctctttaacatcgttggtttccaaacacaccttaaatggggtgagcaaaaacgtgttttccgcatgattccaggtcttgaaaatgccgaatttgtccgttatggcgtaatgcaccgtaactcttacatggattctccaaatcttttgaccgaaacatttgccacacgccaaaatccagaccttttctttgctggtcaaatgacaggggttgagggatatgtggaatcagctgcttcagggctagttgctggtatcaacgctgtacgtcgttttaaaggagaagaagcggttatcttcccgcaaacgactgctatcggctctcttccacattacattacacatgccgaaagcaaacatttccaaccaatgaatgttaacttcggtatcgttaaagagcttgacggaccacgtatccgtgataaaaaagaacgttatgaaaaagttgctgaacgtgctttaaacgatttgcaagattatcttaacgtttagtattccaatactatattaaaagaggtgacaaaatgtttccaattcaattaggactaaaagctagttgcgaccttgagcaaatggaaagtcgcctaaaatatcatccagatgtctttgaatttttcacatctgaaactgacttcactgctagcggcttacaacaccttagagaagctgttcaaacagtaaaagcaagtggtgtcaaagcgattgttcttcatcatccgatgaaataccaaggtcaatttttagaacttgtggcgcaccctaaaaataaggctgatttagtcgagtttatcaactattcaacccaagaattattgaaaatcgctcgagatttcgattgtaaagtcttagttcatggctcttatgaactgcgtgaaaaagatttgctagaaccttttgaaaacattgaagaagcgcaaaattatctttttactcgcatggatgaattttgtgagcttggtgaaaatcatatcatgtttgaaaatggtatttcaaaactattttcatttggcaagcctgaattcgaccaattgttagctcaaaaaggctatccacttgcttatgatatttctcatgctttcatttatctgcatggggataataaagctttgcaatgctcactagaaactttgaaagagactattattcactatcatctagttgactctttaggtgaaacgcatgatagtttgacactaggtcatggaaaaatcaattgggcagaagctctgccattgttcaacgaaaaagccacaagtatttacgagattaacctaaaagatttaaacaatcccattgagcagcttgaaagccacgcctaccttacaaaagtagcacaagcaatcaatagtaagtagtaactgttaagcctgaaacgtttgttttgggcttttttgttgccaaaaagcaaccttacatttttgtaagatttgactttcaaattgtaaggaagtaactacctgattttcgataaaataaacttgtcaataagagaggagcagtcatatgagtcaagaaatcaaaagacatatcaatttatggagtaatcttctgatttggttagtcatggttattttaggttccattacttatattgtctgttacaccctccgtatcacaaaataataggaggaggtttttgaaatggtaggtttttatagtcttattacaattcttcttatcgtcgtagtgggagtagtaagtctcgctctttggtattggagtggaagaagacctttgaaacacccttagtattgaaatactaaatttaaattaattgctttttagcaaaaacattccgattagagtttttatttaatcgaaaaaaggtataatgaaacaaaggagaaattatgttactggagattaatcacttagaaaaagtttttcgcacacgtttttcaaaagaagtaacacgtgctttgcaagatgttgatttcaaagtagatgaaaatgaatttatcgctatcatgggagaatctggttctgggaaaacaactttgcttaatatcttagcaactctggaaaagccaacgaaaggttctgttgttctaaatgggaaagaaatcacaaaaatcaaagaaagccaattagcagaatttcgtttaaacaatctcggattcgtctttcaagatttcaatttattagacacgctttctgtcaaggataatattttcttaccattggtacttggtcgtgttaactaccaagaaatggaaaatagactagcaacactcgctccaaaacttcatatcgaagatttgttagcaaaacgcccatttgaattgtctggcggtcaaaaacaacgtgttgctatcgctcgcagccttatcacaaatccgcagttacttttggctgatgaaccgacagcagcgctagattatcgcaattctgaagatattctaaacctttttgaggatattaataatgacggtcaaacattgcttatggtaacacactcagcaaacgctgctagtcatgctaaacgtgtccttttcatcaaagatggtcgcattttccaccaaatttatcgtggtaacaaaaccaatcaagaattcagcaaggatatttcacttgcaatgagcgcacttcttggaggtgagtaatatgttctatgctaaattagcttggtcaaacctcaaaaaatctgtcaatatttttgggccatttttactcacaagcaccattttatttcttctaaattgttcaaccttgctgattttatttagccctgttggaaaaagcatgtcatatggtgccgcaacacttggcttatccattgttgtcctttttatcttctcgattatcatggagatttacagttataatttccttttaaaacaaagaagtagggaattcgggctttataacatccttgggatgaacaggtttcaaatcagtcttgtatcgactattgaactgattgttatttttgtgggtgtgattatcctaggaagccttttatcagctgtcttttcacaattgttttatttgatttttattaatcttttacactataatcagttggtaatgactttatcaccagcagcgtttattagcacagcgtttgcattcgctgcaatcttctttttcctagaacttatcagcctctttaatatccgtcgttcatcgccactagctttatttaggaggcaagaacagggtgaaaaagagccacgcggcaatattctctttgcgttgttaagcatcatttgcttaagctcaggttattatctttcaatttcttcaacgagaatagctgcgcttgtcgtcctatatcgtttctttatcgcggttgttcttgttatcattggaacgtaccttttttacatcagttttatgacttggtacctaaaacgccgtcgtaaaaacaaaaaatatttttaccaacctgaacatttcgtaaccacagcacaaatgattttccgaatgaaacaaaatgctgtcggacttgctaatattacgctactagccgttatggcttttgtaacgattgccacaacaacgtctttgtatgtcaatactcaaaaacaagccgacgatatgttcccaaaagacactcaaattacaatctattcgacgactgatacagatgcggaagcttttttcaaaacagcagttatcgataaattagataaaccaaaaagtgactatatcacctactatactggttcctcagtaattccagtatcaactgataaagaaatcacaataacagaccaagatatagacactcctgatatggcaaaaatgggctctttatatatcatgacccaagatgattttaaaaatttaggtaatagcctaccaactttaaaagaaaatcaatctgccttttacgttcaaaagggaaatagccaactggaaaaattaaccctttttggaaaagaatttgacaatgtcgaaaatctaagaagtgttatattccctgatattgctaatacttataatccagcgttgttaatcgttagtgataaaaatgttttaaatgaacttcaagagctctttactcaacacaatttccaattccaaagtaatttcactggttacgctgacctttctaaagccgaaatcgctaaaattacaaatgatgatggttacatttcagacgaaacaggtcaatatcttgattcagatggcaacgcagcaacaggaattgtcgataccaaatcatctttccttgaggacatgtatggctttacaggtggctttctctttacaggattcttacttggtattagtttcttgcttggtgcagccctaatcatttactataaacaacgttctgaagggattgaagataaaaaatcgtataaaattttgcaagaagtgggaatgggagaaaaagaagtgaagcgagcaattaattctcaaattttactcgtattcttcatgccactcggttttgcagttttacacttcgccgtagcgcttgtcatgctaaaacaaatgttactcatgtttggggtaacaagctcaagtatgatttataccgtcagtggtattacaatactaagcatcaccgtaatctatttcttcatctataaattcacaagtagaacttactataaaattattgaacgttaactcctatcttcgatcagtcgtttgaaagattctgaaaatttttactaaaaaatggtcgtgatgaccattttttgttacaataagactatgaaacaaggaaagatttatattgtcgaggacgatgaaactatcgttaaacttttaaaacaacatcttagtcaaacttatgatgtctttagtgtcactaattttcgagctattaagcaggaagtcgaagaaatcaaacctgaccttatcctgattgatatcacgttgccgtattttaatggtttttattggacaacagaaattcgtaaaaccatgacattgccgattatttttatctcatctagtgatgatgaaatggatactgtcatggcacttaacatgggaggggatgattttgtgtcaaaaccattttctctaacgattttagacgccaaaatttcagcctttttaagacgtgcttaccagtttacctcggataattaccaattggaccagttttctctgtcgcgtgacggaattttatcaaacggtgacgaccatatcaccttatctccgacagaaaataagattttagcggttctctttgaacatcaaaatcaagtcgtacccaaagaggaattactcgagaaactttgggaaaatgaaagtttcattgaccaaaatacccttagcgttaacataacacgactacgcaagaaaacacaaccattaggttttgatcgtattcacaccgtgagaggagttggctaccttctaaaatgattcgacaattttttaaagaatattccgtctggtatttaacttacatccttttaagtatattattcattgttatttttgccttatatcgcctgccattggcttactttaaagttagtattttaatcaatttaacgattttaatctttatcagcatttggcaataccttaaatttaagcagaaattatctattttacatcattttatttatgtaaaagaattagatgaattagaattgccgtcagaactggcttatagagacattatcatcaaactaaaagaaactagcgccaatgaattgctagctgaaaagacgcaaagtgaaaatctgcaaaatcttgtcaaaatgtggtcacatcaaatgaaagttcccatatcagccctttcattaatggcacagactgaccaactcgactcaaacgaagtacagcaacaattgacacgacttcaaaactatcttgatacgttgttgacttatttaaaattcagtcaaaacaaagacgattttcgctttgaaaaactatctgtcagggatgttacaacaaagattatcaaaaaatatcgtattccgtgtttactaaaaaatctttctgttgaggttgtcggtgattgggagctaagttctgaccgaaaatggctaagctttgctatttcacaaattattgataacgccgttaagtattccaaaacagacggaacaattattattagtataagtgatggaaatatcgttatatctgatgatggtattggaatactagaagaagatttaccacgtctttttgacgaaggttttactggatttaacggtcatgaacaccaaaaagcaactggtctagggctgtacatgaccaaacaagttttagacacccttaacctaaacatcactatcgatagccaaatcgataaaggaacacaagtcgaaatttcatcacataaaaattaacagaagtaggggctaagcccttgcttttttaggtttatttttttataatattgttagtttataaactaacaaggagggagcttatgttttctggagaaaagttaaaaaatattagagaagaaaaaggttactcacaggcagaagtagctaaattacttaatatttctagagtttcctactttaattgggaaaatggtaaaacaaagccaaatcaaaaaaatcttaaccttttgagtcagttacttggtgtcgaggaaacttattttgtatctgaatatgacattgtcgatacctatttcaaactcaataaagacaaccgtcataaactcgaaaattatgctgacgatttactcaaagagcaagaaaaaatagttcagttgcctaagtattatgcttacaaggtttttgaaaaattatctgcaggtactggatattcttattttggtgacggcaactatgatactgttttttatgatgaacaacttgaccatgactttgcttcatgggtctttggggattcaatggaacccacttatttaaatggtgaggttgtcttgattaagcaaacaggttttgattatgacggtgctatctatgctgttgattgggatgggcaaacttatattaagaaagtttatcgagaagaggacggacttcgtttagtctcactcaacaaacactacgccgataaattcgcgccttatgatgaaaatcctcgaatcattggtaagattgtcggcaatttcatgccacttgaagtttagttttacataaataatattatgtaaaatatttttagaacattcattatttatttgtcagcaaggagataataaaaaacctgaactattaatggttcaggttaatttttaaagcttatctaaggcatttttttgttcgtcgttgacaatatgggtgtataagtcggtaacttgtgtgctggcatgtcctaattggtggctaactaggacttgtgatttagtagcatcgtaaagacgtgttgcaagtgtgtggcgcagtttgtggggtgttacacgaactttgaaatcttgagagtatttagcaactaacttttcaacgcttgaagcatcaatacggttaggaacaccgcgatattctgttaaaaagagagcttggtcttgtttttccgccttatagcgaggcgctctgatttgcaaataagcttctaaataaggcttagcaaagttagcaacattgacagaatcacgttttccacctttacgagtgacttcgataaccatcatattaaggtttaagtctttcaaatcaagattaacagcttctgaaagacggacaccagaggcaagcagaagagcaataagcgctaaatcacgctccttattcttttggaaggaggagagggcgcggtgagagagcttattttgatactctgtatcgatatagtcgataaatgccatggtctcgtcacctaggaaaagtttgccttttatattttcagctcgagctgccagcgtttcttttttcttcttagtagcgatttttttcatgacatttcgatagaagtagggctcaccattttcatcttcgacctcttctgttagatatttaaacaggcttgaaagtgctgataacgtccgattaatcgttgtttgtgagacaccttgttttgttgaataagtgttcaaagaaggacgttcacgcagataaaggataaatgattccatgtcttttttagaaagatgttccagagtcgctaattcaacgtcagcaattttagtaacatctgaaattccagaatccaaaagccattcgaaaaatcggcgatattcttttaggtattcatataaggttgtgaagctataaggaaccgaaagttttgattggtaatagtctaagacgtaccaaggcattatttctttaagttcatcaattttttcaagtaatttttcacgtttcatttaaaatctcctgagatgtctttataataggagtatatcacagactaatttgtttttcaagaaaattacagtttttcggaaagatgttataggaaattcactgaagcaaagaatgtctaaataatcacatttaatgttttaaacgttgtttttatcgtgttttcgacaactaatttttttcggaactgcttttactttttttctgtgtttgttgtcttatttttttctatttcttgcgctaaaaaacgtcaacaaatattatgttatttattgacgttgattttgtattgaattttaatgcttatcttatatggttgttttattcaacgaattcgatgatgtttccgctgcaatttttgataagttcgtaatcatgtgtcacaacgatgattaatttccctgtttttgccatgtcatgtaaatcttcaatcatacgttccatttgcagtctgcaaagtccgcttgttggctcgtctagaacgataattggcttatttgaagctttagccatggctaataacaatcgttgtttttcaccacctgataaactttgcggatgtctttcgattttatcgattaaaccaaattttgtaagcgcatcctttttaactttttcatcatcactcacaatggaaatttctgaccagactgattcggtgaataattggtaattaacatcttgaacaacctcactaatccagtcatatgtgggttttacaggttgtttttcatagaatgtttgccctttgaacgttttattgagccccgataggcaacgtaaaaaggttgtttttccgacaccattttttccaataataaagttaatccctttatccaatccaaggttgaaatcaaagatattatccttgctatcgcggtgtttatagcgataattttggcaaattaaatcgcttgaggcaggcaaggtttgtgatttttttgaatgtttttgataaggcaagctctcgattagctctgttttgctgatttcgtttaattgacgaagattctgtgttttggtgaagtcgtctgtaatgtcaattgctggataactagtcacttttttatctttgataacaattaactggttcattaattcttttaaataatacaatctatgttcggcaataatgacgattttgcccatttctttcaatttaaccaagacttttttaaagcgtgcaatagcttctcggtcaagcgatgacgacggttcgtcaaaaagatagatgtcattgtccatgcaagcaacgctggtaatggctaaaagctgcttttcaccacctgataaggcgaaaatatcacgattcagcaagtcttccatttccaataattgcgtgaattgattgatacgctgaaaaatggtttttggtggtaaatggcgattttctaaggcaaaagccatttcgtctgtggaattgacagcataaaattgtgtcttaggattttgaaagacggtagccacgatattgctacgttcagacatatccaaatcaagcaaatttttgccttgataagtgatttcacctgatagttcggctggttgaaaataaggaataacaccattgataacctttaaaagactgctctttccgcttcctgatgtcccagttaatactgtgatttcaccagatttaaagctgagattgacattttccagaacaggttcgtcataagttaacgtaagattttttattttaagcatattgactccaaaaatttaacactaatactgctaacatcgctaatataagaacataatcaaggattcttagttttgtatttgaaatcgttgaacgtttttgcccaacgaccattcctcttgttgtggcagagatagcaacgtcgtctgctgtgcgtgacaagcaaagcaataaaggaacaaaacgatattcaatcatgcgtagcggttggcggaaaaatcgtcgcccaacaagcccatgcagatacatggcttctgtgacttgctgataatcttctttgaccgtataaaagaaacgaaacatgaccgaaatcggaatgattagagcatcaggcaatttcattttttgcaaagaagccactaaatcgctcatagatgttgttaaaaggctgtattctcccatgactatgcctggtagcatacgcaacacaataatcgaaaagaacaaagcaaccgatgctagcaagcctgaaaacgaaaaatagaccgcacatttttctaaaataagcgctactatcaaccaagcaattcccttaaaagctttcccgaatttcttttcacttaataagagcatataaggcagtgccattaaacaccaagccacccaagggtaagttttttgtaagtttccaaataacagaacaaaagaaatcacaattgtcatcaatgcttttgtccgaaagtctaatttcatattgatttaaaaggtgaagcaagccacaaatagccacttcacccattctccttttatctatttttataacaattaagccatgcctaattttttgaaatgtttttgaagcattttaataccaatcgttgctccaaggtagccaccgattgctcccaaaagcaagacaggaagaaatgtccagtttggcaatacgctcatcatttgatcagcgtaagcttgaccataaccttggtcgattaatctttgaatataagcatcacgtgtaatataaatcggaatcatcataaaacctgatgctaatgaataaaccgtaaagcaccatcttgtgtggtttaggctttcgtaatttccttttttaagaatgtattccccaataagagcaagcaacattgtccctggtaagacataaataccatgaccagtcaccataaataacaaaccgataatagtacccatgatgagcaccattccaaaacggtgaatttttgtgctataaagcataaatactggtcctgaacaaagagcacaaataaatggaataaacggcataaatattgggataaaaccaattatgccaccgacaaacattgctgcaaaaacaagcaatgaaaagagacctgcgttgattaaatctttaacagaaaacgattgttttttcatgtgataatgttctcctaagcgttctttttatatttgaaatcttcgattttttgtgaggtttcaatcaattcacgatagacagctgaactttctagcaaatcagtatgccgaccaataccgtcgatttgcccatctttcagaacaacgattttatcggcattttcaactgatttcaaacgatgtgaaataatcaaaacagttttatctttcaagaggtaattcaaactttcttgaatcaatttctcgttttcgatatcaagtgatgacgtgatttcatcaagaagaacaatcggtgcttgtttcaaaatcgcgcgagcaattgacaaccgttgacgttcaccgccagacaattttgcaccattttcaccgattttagtatcaaaaccttgtggcaatttagcgataaaatcttgacaattcgccagacgtgctgcttctttgacttcttcgtctgttgcatcaggtcgtcccatacggatattttctaaaacagtgttattaaatagagtcacatcttggaaaacaattgaaatcttatcaaagagactgttggtgctgatttgcttgatatcatgtccaccaacgagaatttgtccttcttcgtaatcataaaggcgtgagactaaacgtaataaagttgtttttccgcagcctgacggtccgacaagtgctgtgatttcattttgattagctgtaaacgatacacctttaatcacttgctgggcgtctttatagccaaatttcacatctttgagctcaatatcaaacgtctcaagggcgacatcttctccgatttgttgttcaatgttacgaagagtattgatgtttttaaccgcagaattgatatagaaaatttccgcgacgtcaaaatagacattttgcaaggcatctgaaatttttatcgctaacaaaagataaacaatgaaaacaatcaacgaaacttttccttggaaataaagcgttgaaccaaagaaaatcacaataccaattgtcaatcgcaccaatggattggcgataccgagcggcattccttgcgtaaattctgatttgatatggatgcgttcactatcttccatttgttgatacaaactatcatggaattgctccgctaaattgtaagctttgatttcttgttgcaattcaatcgcttcttggaaactatccgaattggcacggagttgcttccaatattttgtgacagctttttcttgagcttttttagagaaaattaaacaagctgcgctcactaatactggtattaaaatacacaagcttagtggcacattaaagaaaagcatggcaattgtaaccaatgtaaaataaatcacaaaaccaaccgtttttgaaatggcatggctaagagcgtgttccaaacgctccacatcactcatcaaggtttgagataagtctgtcaaatcacgttgtgagaaatatgacaaaggtaatttttgaagaatctcagcaatattaactcgaatatcaaaactttcttgataagtagcggtgtatgtcgcattgtaatcaatgtacataaaactgtaagcaaccacaataatagcaataagcccaataatcattgtcgaaagtgacaacggatgtccttcaatcacattttgcacgtaatatactagtaagccaatcggtgccatttctgcaatgaatactaaaatcgcagtgaagcaagctttgatgacattattggcgccattttcagtcactccaaatacattttgtaatttgtttttcatgagaccctccattcattagcagatgcgtaaagttctttaaagtgtttgtatcgaccagcggcaaccgttaattcttggtcactaccacgttcaacaatagcgcctttgtcaataacaagaatctcatcaacacctttgattgatgacaaacggtgcgcgatgatgataactgtcttattggcgataagattagcaaatgctttttgaatttggtattcgttgttaacgtccgtagcggctgacgcttcatctaggataacgattttagcgtctttcaaaatagcgcgagcaatggcgatacgttgctgttcaccgccagataaatacactcctttagagccaatcactgtattttctcgttcaggaaatttatccaaaatttcttgacatgatgctagtttcaaagcgttcatgacctgctcataacttgcttttggattaccaagtttgacattgtcaaaaattgacattttaaaaagttttgattgttggaaaacaaaggcaacgtgtttcattagggcttcttggcgataattttcaatcggttttccacctagtaaaatgctaccgctgttaatcttataaaaaccagcaattaattttgcgatcgttgattttccactaccactacttccgacgaaagcataaactttattttcatcaagtgtgaatgataaatcttcgatgatattttgctcttcataaccaaaggaaacattctcaaaacgaatactaccatccgcaaagacttcctcttgtccagtagagacacggttgctagtcattgcttcacaaatcgtttcaattttttcagccgaaatatcacctttgtagaggtacatgaaaacatacataattttcatagaagtcaaatacatcaacccaactgcacagaaaaagaaaatgaactgtggcacagactccaaatgctgactttgtggcacaagcgcagtataaatcgggataaataaaacggtataagccgcaaacatcacttggaaaatcacgtaagcttgacgacatgaaaagctataattcaaagcataatcagaataatctttaatcgcttgataaagtgctttaaaggattgaacagacgttttaaaaatcttaatcacctgcatcccacgaacgtattcaactgtttcgctgttcatattttcaagagattgcatataagatttcataaattctgcatctcccatcatgttcttaatttggaaaatagctaccactgctagaacgagaagggcaattcccatataagcattaatagcaaacgtaatccccaaaagaaccactgccgttacaaaactcgtcgtattatcagggattaaatgcgcaataattgtatgtgtttctgcagcattatcatcaatcgttttacggattttaccagacgttgtcgtatcgaaatatgaaaagtttgaggtcgttaacgcatcaatccctttctttctcaaatttgtttccaaacgaaaggctaccaagtgtgtcagaccaccagcaaacatataaatcaaaatgctagcaaccatcataaccatgataatcatcgcgtaaaaagcgctatctgtcgcattattctgaacaattaatcgattcaaaaactgatagacaaaataaaaggcgcctattgacaaaatcgatgaaagcgcagccaataaaatagcaagataagccatgaatttgtattcaggcacataggaaaataattttttataaaccttaaacattttctctcctttttcactttaaccaaaatattgctaaaatagtaacaaagcattataataggtttgagatacattttatcatgtaataattatcagttcaatgcataaaagataagattggcgaattgtattatttggctaatcgtgttattttatttaattaaggatagaaaatgacttcgatttttttcaatcatactggcaaagaagccattccattaaaaaattgtgtgagatttgctccgcacggacaaacttatcacctcgtaaatgacgaggttgacggctttttctgggaatataagacagattatttcgccattacgattttcgatttttacctcaaaaagacgcttagttatgcttatcagctagaagacttctcaaaatatgtcgccttttcatcgcacatcatgtatgccaatggcgagattctccctccttatcagcaactttctagcaataaaagcttggtactgttcaatcagcatcaaaccttgcaaacacacctgcatcagcattccaactactatgctgtcaacattgattttacgcaaaaaatggttgatgagtatttagtagggcaataccaactgaatcaagacgaaatttttcagatttttcaagaggctaacagctttattggtggtcgatttggaaaaattgctgacgaaatcatcaattacaaagtttcttctatcggaagtgagcttttttacgaaattaaggctaaagaatggcttagcatcattatcaacgattactacaatcgtcaaaacgaaaaacaaatcaaccgagatgacaatctggcactagaaaacgtcaaacattacattaatgaccatttgacaacgaccattccacaggatttattggctaaaatcgccatgatgagcaaaacaaaattaaaggactctttcaaattaaaatacaatatgaccttgacagagtacattcaacgacgacgcatgagtttagccgagcaattgctaacaaccacacaactggaaattaaagaagttgctatcgctgttggttatcattcgcacagccgtttttcgagcctttttaaaaaatatatcggtgtctatccgcatgacatcaagaaacaaacctcttttatccaaaaaagattgccatgcgataattgccaaaacgaaatttgcaaatcacaaaaacttgcagaataaattaacgaaaacaaactaaaaacgaagctagacttttgtctcagcttcgtttgttttatctaaccttatttacggcgttttttcttcgcttttttcattttatttgccatgcgtttcattgattgcttcatcgcaaattcgccgactttcccttttagaccgccgcccatcatttgactaagatccatatctccgccaccaagtgctgaaaggtctggcataccattaccgcccatcatgccttcaagtgatgacatatccataccgtttggcatatttttagggagattatttgggttgattcccatttgcttcattgctttttccatgtcaccagacataacaccttgcatcatttgttttgcttggttgaaatctttgatgaatttattaacttcaacgaagctatttcctgaacctgcagcaatacggcgacggcggcttgggttgagcaaatcaggattttcacgttcttctggtgtcattgatgacacgatagcacgtttacgagcaacagctttttcatcaactttaaagtttttaagcgctggattgtttgccataccaggaatcattttaagcaaatcttccattggtcccatgttttgaacttgatctaattggtcgatgaaatcgttgaaatcaaaggtattttcacgcattttttccgcgagttccaatgattttttctcgtcatattcttggctggctttttcaatcaatgtcagcaaatcacccatgccaaggatacggctagacatacggtctgggtggaaggtttcaatatccgtaattttttcaccggtaccagtgaatttgattggtttaccagtaatttcacggattgaaagcgcggcaccaccacgtgtatcaccgtcaatcttagttaaaacaacccctgtgatatccaattgtttgttgaattcatcagcgacattggcagcttcttgaccaatcatactatcaacaaccaaaagaatttcatttggatttgctaaagccttaacatcacggagttcttccatgagtttttcgtcaatttgcaaacgaccagccgtatcaatgataacgtaatcgttatgattttctttggcttgtgccaaaccatttgtcacgatttcaacggctgagtggtcagttcccatgtcaaaaactggcacattgatttgactaccaagtgtttttaattggtcgatagccgctgggcggtaaatatcggcagcaatcatcaacggacgtgcattttcatctttaatcagcttgttagctaatttccctgcaaatgttgttttaccagcaccttggagaccgaccatcataatgattgttggaattttaggtgatttttcaagttcagctgtttcagaaccaagaatttcagttaattcttcgttaacaatcttaacgatttgttgtgttgggtcaagtgtatcaatgatttcatgaccaactgcacgttcacgcacgcgtttgatgaaagtcttaacaactggcaaagcaacgtcagcttcaagcaatgccagacgaatttcttttgtgacttcttggacgtctttttcagacaacttcttctttccgcgaatatttttaaacaccccttgcaggcgttctgtcaaactttcaaaagccatagtatcttttctcctacctaagtatctctataattttacaaatgttcttctgtttgatgaataatacggattaatcacgattatcaatactactcaaaacggaaattttctctttcaaaaatttatcatcaggatatttttctaaaatatcatcaaaaatttggctacgaacaatataatctgaatacatgtgcaacttcatctcgtaagcttctaagattttttctgttcgtttaatgttatcatagactgcttgacggctcacaccgaattcttcagcaatttctgccaaactataatcatccgcataatatagttcaatataattcatctgcttgtccgttaacaaagcagcatagaactcaaaaagagcattcatacgattggttttttcaatttccataacctttattttaccataatttagctgaatttaatagtcagaaatggttaaaaatcatgatccctcattttcgataaaaataatagtaagaatgctttttcttgctttatttagcgtaaagtggtacaatttattgtacaaaatagacagaggaggagccaatatggaagctgttgcatattcaaattttagacaaaatttaaaacattatatgaaacaagttaatgatgacgctgaaccacttattgtaacttctaaaaatattgatgatactgtcgtagtcctttcaaaacgtgactatgatagcatgcaagaaacatttcgcattatgtctaataactacctaatgaataaaattaaacgcggcgatgaacaattcaaggcagctaattttcagacacatgaattgctcgaggtagatgatgattaaagcatggtctgacgatgcgtggaacgactatatgtattggtataatcaaggaaataaagcgacaattaaaaaaattaatcgtctaatcaaggagattgactgcactccttttactggcattggtaaacctgaaccacttaaacacgatttatctggcaaatggtcacgacgtataaccgatgaacatcttttaatttacagtgttgatgagactactatttacttttattcttgcaaagaccattattaaaaaaactgtccactggacagttttttcatgagcctaaaaattgaaaagcgaatcatgagttttgtcatttcaaatcttttgtggcttcttctaggatgtgcatttggagaatggtttgttcctctgttaccaaagttggtttgtgattgatgagagtttcatacaaggcgtcgtaaaagcgaccgttatctcctttgactgtctctactgcctcttcatggtaatgcccattgtcatcgtaatacgttaacgtgccaaaattttctggtttatccaaaccaaagtcgtcattgtctggcaaatagaatttcttgagatccgcttcttggcggtctttttcgtatttaacaaacatgcccttgcgaccataaacgacaaaacttggacgttcttttactctgaaatagcttgattttaccgaaacttttaagccgccaggggcaacatgaaatgtatctgttaaattttgataataaaaatcaatgtcaaaataatcattcatgcgcccagcacctaaaagctgacgcacatcataatgtacatcatcaggcttgccaaaataagaaatcacttgatctaccgtatggcaagcgtggttataaacataagattcatctttcgaatattgtgtaacattctctggcacctcagggcggtagtaatcgtagtgcatttcaacttctaacaaatcacccaattttccagaagcaatcaccgcttgcgttgtcaaaaaatcactgtcaaatcggcgattttgatacccttgtatcatgagccctttttctcttgccaaatcaaataattcttgtgattccttaacagactgagtaaatggtttttcaagaacaagatttttacctgcttttaagacctgcttagctgtctcataatgtgcgggagcaggcgtcgtcacaacaacgacatcaatttctgagtcgttcaacaagtcatctaatttatcggtgtaatgagcaccttcccacctagcccaatcatctcgcaaagttggggcataaattgtttttacaaaaatagtatcttgccgacgcattaaaaacggtaaatggtaacgattcgtacttttaccattgccataataaccaattgtcaatcgttttgtcatgataggtctccttttataaattaaatcaaaaatcctgtgaatggctctgcttgaaccgaaagataatctgccattcctgctactagaacacgaaaatcatcaccattttttaagcctgataatccaactacggcgaccaattcctcgcccaccttaatcggaaaagcgccgctaacgggtaactgcgaatggatttccgtttctgtcaaagttatttctcctacatgatgagcaactaaagcccagaagctattgtgctctgtttttaacacagtttttatcttgccttgaacaaaactgagatttcgttctttcgcttggttaccaacgtattgaaaaatggggactttgtcagatactctgatgatttggatagcgagtttttcagcttgctctgtatttttgagtatttttccacccaaagcaagtgcctcttgactaccaaaactttgaaagcgcagctgatgttcaagtttctctaactcctccaaatgttcagctttataatagccttttgttttctctaaaatcgtttcatttgccatataattaattatccattgggaaaataatgcctgcttctttacgcaattgtgtttgaactttgctaacagaaagactggcttcaagttctttgtagcaagcttccaaatcattgtcattaatcattttgacaaaagcttgaaattctggaataagtcttgcttgtgacaaaccgtcatcaaaactttctttgctaccgtcatttaagaccaatttgacctcaccgacgagatttggagatagcgttgtttcgatatacccctttgttccttggataaggctgccagattttcctttgctgtcttttgctgctgtacaaaccgcgataaagtctggatagtttaacacagcaacaccacttgtatcaatgccacgttccacatttgcaaaataatgctgattgtctggttgaccgaaaagtcccatgacaaagtgcaagttatacaaatttaaatccatcatggcaccgccagctttggcagggtcaaaaacaggtaaaatctcacctttctgaaaagcatcataacgacgagaatattgactgtaattgctttcaactaattttatctgaccgattttcggtaaccattcacggattttttgataggttttaaaataacgtgtcgtgatagcttcaaacaagaacaatcctttagattgtgctaattctttcaaatgctgtgcttctttggcattacttgtcattggtttttcaacgatgacgttgagcccgctatttaacgccttttcaacaaaactaacgtgtaaaaaattaggaacggcaatataaacggtatcgatgccagattgacttaattcctcaaaatcgctggtggctagaggaatgttatactttgtacaccactgctttagcttgtccatatcacttggaacgctttgaatccctaaaatttccaactgctctatttgaaccaatttcggtaaaaattcttcaacaattaaacctgctccgataatgcctaatctcattgtttttctcctttgtgacttgatactgttatcttacgccttgtttactgaaaaagcatggttttgagcagatttagaaaattattttcacgatttttttgcctagatagttcttttatgaacatttttttcagacatttttgatatacttaaagaaaaggagcatgatatgggaattattgcagatttggaaaatcaaacaacctttaccgagcttgaaaaagagctttctaattacattttagagcatttaaacgacattccacagctgacgatttcgcagctagctcagcaatcatttacgtcaaatgctactgtcaatcgcctatgtaaaaagcttggtgtggctggttacaaagcttttcgtattgctctagcagccgaactcgaaaaacaacgtttttcaaaaagtcatgttgattttgacaatcctttctccatgagcgaaaatacggcgaatatcttcaaaaacgttgccagtatttctaaggaagctatcgatatttgctatgcttcggtgtcacaagacttagtcgccaaagctgcgcagcaaattgccaaggctaagcgtgtttacatttttgcgacaggagattcttacttggttggcttgtctttttcaaatatgttggtaaaacttggcattcaagcaatcatggtcaatcaatttcatgacagtatcgctgtgatttatcattcaaacaaagatgatgtgattctgtttttatcttattctggcaatatcttgaatacctacgctcaagaattagagcttatcaaaacccgtcatggaaagacgattctgatttcttccaaagcttttaaagataagattgacttaaacatcacttttcctgctaaagaaagtatcgttaacaaagcaggcggttactattcacaaaccgccatgcattacattttaaattgcctttatagcctgctctacacctcaaattactttaccaaccgaaggcaaaaaaatgccatcgaaaacctagccaagaaagacttgcagtgattgtgagtataagaaaaagctgaacaacgtgttcagcttgattttttagcttttttaccaaagtttatttggaaaatgaggtctgttcttgcagaatccgcagtttgggtcaccgcagcgagactctagccaacgattgcagtatgggcaaaaataagcatcaaagcgttcagaataacacctttgagccttgcaaaatcggcacttatcgtcatcaatccacccagcaatttcaacgttatttatcaccaacttatcatcgtcaaattcctgaacagtcaatttttctaacatattgtcaacttttgttccttaattattctccaaataaaattcaaaacggtcgccgacgtattggctgtgaacgtattcaaatggtcgtccgtctgtgaaataggatacctgtgtcaatgccagcaccgcatgatttttaggcactttgagataattcgccacgcgctcacttgcatttttggcataaatcgtttgctgactcttgccaatttcataaccattatccgttaatgtttggaagaaatgctctgtgatgtcctcttgattgaaagactgaatgagcttttctggaattgatgccacttcaaaaaccaaaggaacgttatctgcaaaacgcacgcgctccatacgcaccacggtatctgtcgcttttagttgtaactgctggatttccgtttcattagcagtttttcgctgataagaaatcaattgtgacgacggcgttttaccctgcgagcgcacaatttcagtgaaactggttgtcccacgcattttttcttgcacacggtggctagccacataagtcccgctacccacacggcgctccaaaatgccctcttcgaccaaaagcgtaatcgcctgacgaagtgtcatccgactcacttcgtaatcatccgccaaatcacgctcactcggcaaacgctgaccaatctcccaaacgcccccatcaatctctttcttaatcgcatcatgaattctaatatacgctggaaccataacctactcccgttctgttctaaataaccttgctttattttaacatatttttgccgaagtttttagtcaccattagcttttttggacttgaacaactttattgtactgcgaagggagttactttggataactattgttttccacccacaagcaggtggttattttgcctcacttctcacggagtgcggctagactaaagtcagataaaaacatgtactaaaattgaaatcagtaccttttttatctgacttattctaaatttcataatacatctgaattccgttttcttttacaacaaatattgtcttagaatatcgatatctttattgatattctttagattaattgtcgaaagaacttttttctccacttctggagtccaataaattttcagattcttttgcgctcttgtaatagctgtataaaaaatattatgggttattagctcatcaacctcatcagtaataacaatctttacagagctatattccaggccttgggccttatgaatagaaactgcatatgccacctgaaatggaataacatcatgtgctgaattatcatcatcgtcatctgtactctttaatttattaacataaaatctgataacagaattctcagtgtcagggtattcatcatcaacaagcataaaatccgcaccaaatgcatccatgccatcaatcactttctctagttctacatcgaaaactattcgttcctgcggctgatctttatcaacaatttctattcctcttattttccctttcatattgttgtaaatgcctgtaccaaaacgctcattctcattaaaaagaataggatcgccaaccttaaaacgttgaattccccatttgattggctcattaggattactctcttgcaagaatctattgatgttatttatgccgtaaaggccgtcatagtttaagcaaagaataatctcatcatcttcagcagcatcaaaaattgacgcatctaatgttaccgagtaatctttacggataatagcctccaagattctactatccattgcccgtactctatcccataaggttaataagcccgtatcgtttgttctatacggcttggttaattcaaatactgctgtttcaggtataaacgccctagccacactaaaccaattaccaaaccttatagcggaaatctgatatgtatcaccaaccaaaataagaattttaaactgtgccttttgcaatacttgccacatatctttgttgctaactgtactgcactcatcaataaccaaaacatcatattccgttcttatatttgatcttttaacaaatttggctattgtcatatactcactatcagtagctgtaacttttctttttagattatctacagcaggatttgtttgcgccaaaaacaatttagaattagctgcaaaataatgagaaagatggtttattaatgttgattttcccgttccggcagatccataaataagagctacacatgactgatcaaacatatgtagcatggcttctttcttctcatcacaatccactccattattaggatcctgtaaccagacagccatcttgtttgaataattctgtattccagagattgtaagcgactttaatcgtgaaataatgtttactgtgtcattcttgtatctattgataaaaatctggcctttatcaataacaagttttcctgattcaacatgcccagaccacaattcatcgttatatgtagctactaactgcgggatattctcaaagttttccaattccttaagtgaggtaaatagttgtccttctatctccgtcttattatgaacaaacctagccaacaactcatgttcatgatttctcaccgatatgcatttaaaaatatcagacaaacgagatgtgtgtctcatcggaaaactgataaaaggcattttatcaaaaggaatgcacccattctgtaggtaaagattcgaaagataattattcttttcaccacttctttgatcctttataaacacattattcatgtgcagtaaaatataccttaggatgttagccccctgcttatctcttttgatgatttctctgctcttatctagtgcgtctatgaaaggataaactctagctgattcaagaattttatttctaatagcgttatacttttgatcagaaaaacagaccaactcaactagattaaaacctgaggatgttagaaactgaagcgtatttagtttttcattttttcctgcatccctctgctgtcctgatacaatcgaaatataattcctaaattcacaatcacgaatagaaactgcccaattagtaacgataaaaataggcatttttattccaagaatttcaatatcatcttctacgcaagtaagcttgaccgcataatcatcagaaatatcataatctgaaaaagcaatgattctgtttgacttatttacataatcatttgctggtgtaaaagtaatttcataataaatctttccatcaacgaaaaaaggctttttcttcaacatataatagcgttctgagttgccataactaacgcctttatatgtttcaatttttacggcaatcttctcatagtactcttgaagagtttcatctaaatcaattggaaattcttctaaattatctaatatttctaaaacatactcatcatgaagaaactttcttagttttaataaatactcatagtatttgagcattaaccgttctgagttttcctcatccatagtataatgggaagccacaatttgaaggaaatcatgaagtctcctaatatccttgtattttccatgagcttctacataatcaattgccttacaaatattgtcataatcatcaggtatatcattgcctctggcataaatcttaagcatgatatgttccacaaaattccttaactgtgccaagatgtcctgcgaaaccatacctcttgtttcaccattagcttcagatatatgtctgcatatacttttatttataatcaatatctgcttatcgatacttgaaatccccatcaataattctccctaattgagtaaattcaaccattttctagtacaattatagcacacaaagataagttttatcagctgcacttttttgctaattttaaacattttctacgattttactatggtgagatagtgtgagttattttttattatcttcgccttctaaccctaccaattgtcgttggcgtttgttgactgtgccgtaccttttctcaagcaaaataagactgcttagaaataccaagctcctttgctagctctgtctgtttcaaactaagctttaaacgacgattttttaactttttaggataatacatcaaattcacctcttttatcgcattttataatgataaactgacttaattatacaaaaagtggaacaatatccacttaaattattgtatagtattcatccattttttgctgcggaacatgatgatagagataattagtctgaagagttcttcttgtgataggaggaaatagacccatacgattggtagttttaaggcgagtcctgtgaggagtccgatggggacgccgataagccaagtgcctaatatgtcgataatcatgatgtatttggttctaccgccacttcggataatgccaccacctaaaatcatattttgcactttgattggggctagaatggcaaaggctaccagtagttgtgagccaacttgactaacatctgcttcgacattgtaaagtccgatatacaagcctttggtggcaataagggtaatcgataatatcaaagagcccaccaaaccgtagaggcacagctgtttggattcttcgtaggctttgtcgtaatcacgttttccaaggcgtcgtccgataaggatacctgccgcttgagaaagtcctgataaagctccgataaatagcccttgaattggtcctgtcaatgacattcctgctaattcactagttcccatatgcccgtaaatgtaggtattcacattttgtcccattgtccagaggaattcattgataacaattggtaagagcataacagcgtattgccgaatttcaacgctgtccatatgtaaatcaactgcgaaagaacagattttgcggtagtaataaatcattaagagaagattgacgatttgtgacatcaaacttgctacggctgcccctttaactcccattggcgcaaaaccaaaatgtccgaaaatcaagagataattcaaagcggtattgacaactgctgccacggcactaatataaagcggatattcggcatgattatgacatctcatttgcaccgctaggattgaagaaatcccagacaaaggataaaccaaggctaagattttgatatagtctgcggcattagcaatcacggtcgtgtctttggtaaatatccctgaaatcatgtgcggcaagaaaaagcagacactcatcgtgaaaacagctaaaatcatcatcaccagaagattaacagacatactggtgttgattttcttttggtcgttttttcccatatactgagaaaccatgatgcctgtcacggtggcaatagctccgctgacaaaggcaaagacgaattctggcttaccgcctatttctacggctgcaatcgctgttttgccaagctgacctaccattaattggtctatcatggaaaaagaagattgcagcatagcctgcaaagctactggaattgcaatcttcatcgaatctctaaaaaagtgctctgtttttgtcatcttattgtctccataactcatattaatgtcattatagagcaatcgtttgcatttatgcaatggactacttgcacaaattttttagacagttaaaccataaacgctctaagtcatttatccacttttttacgaatgccgataagacctgacattgtcaataaagtcccgagaagaatggcaaggagtgattgtttttccgttcctgtttttggcaatgtatcagcgatgtaggcatcagaaaccgtgacagaatcgattgggtcaagagcattatcaatcgcttcttgtctcggaacgataactgctgtatcacttgcagttacttcgtcgtcagtattaagctcatcatcgacatcagcagaaatatcgtccgtagtcggatttaaaacagttgtttctgggtcatccaaactttcttctgatacgataatatcatctaaagaacttgtcggagcttgatattgatatggagtatagctaacactaacgacttgcaaagttggttcttcaaccgtttctagaacgggaacgctgtacgccttaacgcttgaattgaaagcaaaccattgcgttgaacggttgttggaaccgaatgaaaaatgaatctcaccgtcatctccaaccacgccgacaatggcaccataccatgataactccgtaccgtcccattcattctgctcaaatcggctaccttgttcaagagattcgttgctggtagcggcgtaagctcgattttcactagcattgtaacttacagaagacccattgatagcaatataatcaccatcaaaattcgtcacgtattcatcagaatttaaaacataagactcactttcgtcatcataaactgcacctgaattgagagaggcaaatgagagtagagctccagagacgtcaatagcttcgccattttcatctaaaaattgcacgtccatgccaatctgcgttgtttgattcaagctgataacatcaatggtgtttgttggatcgttgaaaaattttaccaagacttggtcgccagattctggactttctaaggtgtaagtatataccacactagcaacttttgttgtattgaaataggtattttcaagattgttataagtaactactgttggaattccttgttgtaggaaataataactgccactactaatgtaatttggattgctgataatatcatttgcaatgatgtctttgtcctcgacggcattagcttctacccatgcgagtgcggttgcttggtcaactgctgtggcattgttatcaacttctgcaacggtattgggttctgagcctgattcgaagataagagattgtcctgccgcttcgcttaaatagccgtcctcagttattttagattcgtaatcggctactgctgcttcataagcggcttgattgtcagcaacttcttgattataattttcaatggcaacagcatagtcagcattattttgttcttgttgagcggtagtgtcttggatagcttctgtatcagcaatggtattggtaacggcttcagataaatcagatgtggttaccgtgtcttctgttgttacctcaacacctgccgcttgcgcttctgtgatagcttggtcttggtcggcttgagcttgtatcaaatcagattctgtcagctctgtatcagtcgctacttgctctaccgtgtcagttgttgtctcatcagcattgacttgagcattgtttatcactaataaacctgcaacagctactgaaaccacgccaatggtcaatttccgaatgtaaaatgtttccttagactttttaaacatatcaaatcctcctaaaaaagcaaaaaccaccaaaccagaccattaaacggttgatttggtggttctttttcatacatagtgtctaaaaatatgtcacaaccaccagattaaccagttttgcaacccattgaaaatggactatttttaaggaactattagtaaatcatgttatccccatgtgtaaccacgcgcattgaagaacacgactgtgccgtctggcaaggttacccattggttacgtacttgttcaccagaattagcgtcatagtaataacgtaagccgttaattctaacgacgtcacctttcacttgtgaaccatctgcgttgaaatagagattttgtccgtcaatgacttgggcaccagttacggcaatgccgtctgcgccaaagtaataccagacaccgtcaatttcaacaaatgtattgactgccatttcacctgaatcagcatcgtaataatagcgattgccatttgcatcagtgacaatttcacctttgacttgaacgccattatctgcaaaatagagatgttgtccattaatgacttgagctcccgttacagcaatgccattttcatcgaaatagtaccaatcatcgccgtcgccaacgaatgtattgactgcaagttcgcctgaattggcatcataataatggatatttcctgctgtatctgtgacaaagacgcctttggcttgtagtccgtcctcagcaaagtaaaggttttgtccgttaatggtttgagaacctgtaactaaattgccgttttcgtctgcataataccaatcattatcacccgttgtgaagaaatcagcaacgattttttcacctgaatcagcgtcatagtaactacgagtgccatctgcattagtcacaaagacacctttagcttgaacaccattatcgtcaaagtagagattttgtccagcaatggtttgggcacctgtaacagcaataccattttcatcgaaatagtaccagtcattgtcaccgattttcacaaaatcagatacgaccatttcacctgaatcttctttgaagtaacgaaggttgccgtctgcgtctgtaatcaattcgcctttgacttgataaccattttcatcataatattgataaacaccgtcaatttcaacaagaccacgcgccatgacaccattttcatcaaaatgacgccattttgtgacagttgttgtcacaccatctacgacttcttcaacatcaaatgaataataattattgaagtattggttgccaagtggtccaaagtaatattgattgccattttcatcttcataaatcgcatcacgtagttgaataccatttggtaggaagtaataggtcttaccattaatttcaacggttccagtcaccatgtaaccattgtcatcaaagtaataatagtaaccgttgtaaacgataaatgaagctttcgcacgataaccactcgttgagaagtaactcatgccagtaccgtcataatagaatcctgtaatagctgaatccgttgtcaactgttttggaaggaaagtgccgttttcagtcacggtgaaataagtacccgtcgccgcatcgctaagcacataacctgcccccttaccaagaatattagtaccgttgaagtattcggctttccaagtcttaatcttagttgaagggtcaattggttcgccagttgaaatcattgctacttcaaacatttctggataggtttcttgaagataatccaagaattcaccaccgtattgtgcttgataatcttcaccactactcttgctgttagcgacataaagagtgttgttaatgtaagcaccttctgtttcttcaccataatcattcacacgagttgctgtgacaacttcttcacctggaagtgagtaaatttggtctggaacccagtcagcaatgacttgaatacctgccgcatgaagcgccttaatcgcatttcgtaaatcttctgctgaaccgtatttattgttttggctcattgctaggtcatagcggtcatcaaaggcatagccgttttgaatgattgagtcaaggaatgtaccgtcatcagttgacacgtattgtggtgccatttcaaatgaggtaataccccaagatgtaaagaggtcaacattttcagcaataagcttatttgtgtattctgaatcgtctgtaacaaaatcttggaagtttgagaagccttcgtagattacttgagaatcaagcgcagcggttgcttgataagtcaattcaccttctgcataagctgatgtgtcagctgatacacgaatgtcttgattttcatctgccccaactggaacccaaacagaaaggtaaccattcatatcaacggtttcataacctttgatttcatctgctgtgaagtaaatataaccattgtcatcaacgagtttcgtgatgtcagtatcagaatcgttgagataagattgcaaaccgtcagcagttgggtaaagcaatgggcgatagtattgaccagcatgggcaacaccgacttgaacagcaatcacttcggaatcgtccaattgaagatttggattgttagaaataatcgtcacaatacctgaggtcaaaacagaatcatctgttgcttcttggtcagctgtcataattccataaccatagcgaacagaggtcagaacacctgtttcattcaaaacggaatcagcattatcagttgacatgcttgaagccggcgtgtagtaagtaaccgccattgattgcccaccagcagcatatctaatccgtgcttgtagcaaggtcgtgatttggtcataatatggtgattttgttgccatgtattgaccattatccgtataaaggtcaccatagtaaacacgtggcaccgattccatatttgtcaaaagaagtgaataagccgcagaaatgttatagtgtgtgtattccttatcaacgctattcatgtcagcattataaatttcaaaggcttgattcaattcatctaaagtgaatgtgtaaccgtctgtttcaggattaatttgttcagcgataattgatgcgatgatggtttgcacttcactatcatgtgcacgaacaaagacataagacggcatggtatcgccgtaagcactatcttcgctacgatcagtcaagccaatttctgacgtgataagtggttccaagccagaacgctcgtctgttggacgtgtcaatgaataaaggaatgacaaacgaagtccgttatcaattgctaacgctgcaccattcgtatcacggttatagtctgggtcattataactccaagcttctaagatagaaatatgagcaagagcctgcgcttctgactcgttaacaccgtaagccgcttcaaacaaattagtgtaaatttgaagaaggtcagcattcacattatcaacagcatccacacgaacaccgtcaaagttagcatcgtcatcaccaaagacaatacttccccaattcatgagatagtaaagctgattcaattgctctgcttgaacaactggatttgaattatcaacgtcattggcaagaaggaattcataaccacccgtacggtcggctttgaagtaatttgtctcacctgtttgataagttggtgtgcggttaagcaagcgataatctgaattagcccatggcgtcaaatcactattaacatataaaagcgctccaccttgcaaatggtcagttccctcattttcagtattgatattccatttgtcttgtgtcgtcacaaatgaactaataatttcacgcaaccaagcggtgttttcttgacgtgtgatttcttgttcaattttcacttgtacagcttctgctgccaaatttaggctggcttgagaatcgtctgctgaataggttgttcccaaatcaaaataatcagacatatagttcagataatcaatttgcgtatcgacatctggccaccaagccattaacaatggacggaaatcagtttctgtcgaatcaacccaagtctcaccattttctaaaatcttagtaggacgataccaagtattagctgtcaaatacccatcaatcaattcaaagctttcttcagttgaatcataactttgattgttaatgctaaaattgtcaactaaattcgttagtccttccgaaaatgagtaagttgatgttgaggtcagagcacctgtctccgcatcaaaataaagtaattgtccatcaacggtaatcgcgaagtttttcttaacattgccatcttcgtcaatgtaataatatttgccatcaatttcttgaatattatccaagctcaactgattggcatctgctccagtttccgtaacagctgaacgactaacttcccctgctaagtcagctgttactgctgtcgttgtatctactgtatccgttgttgtatcatcagaattatctgctgcctgatcaacagtcaccccgtctgttgtatctgttgtcgtagcagctgtatccgttgatgtgacttgagaagcttgtactgctgcgctcgtagtagtctgttggtcagcgtcaccagtaacatcttgcgaatcatctgttgaaacagtcgaatcagtagttgtactatcgtcagccaccgttgaagtatcttgcgtatcagcaacggttacatcttgtgattgtgatgtgctactatcaactgctgtatccgttcctgaatcatcagaaactaaaattgtggtgtctgtcgtatcggcagaaacagattgagtagggacacttactcccaagcctaccaatgccaagctcgtaacggcaattgctacccactgtttcttaaccttatgtagtttataatgaacctttttttccatatagttccctcctaaatagctcataaacaaaaagactacacctaaagtgtaatctagatttaaatttgcgttttatttttttacatatatgactagttgcttttcaattttgcaatagtgtcctgcatttgctgagcaacattataacaatccaaaaacatcatgatttctgtgcatttttccatggttgctaaaccgtctgaatttcccattttaaatagataataacctctataatatctaataacagcgttttcaaaaaagtctatttcaggcttctttaatcggtcagcatagtttaaaagtttgagtgccactgaaaagtgttccttttcaatacaaacgctgataacactaagcaacatctgaataatgagtttacgattttcaggaatttcttggtaaaattgcgtgcgcttcaccatttctcccgcaaatgtttctaataaacggactgtcattacagaggcactattagtgaataaccagagttcataacgcccccattcttcgactgaaaaaaggtaatcaaccagatactgaatctcctttttatttatcttttcttgcttggtacattgacttagaatggctttgacgacaagcgtatttagtttataaagtttataatttgaaaacctctcttctaattttttacaattttctaaaatcttttccaattttaaaatattcttttcaaggtatgcttcagaaatgtcgttttgaagaaaggtattttgtggttggacaaagttgtgataaacgctttgaaactcgtccatagtgacattcatattttgcaaacagatatagagaacatctgccgtaacatcgctaattccacgttcaaatcttgataattgagcgacagaaacgaccccttcagcgacttctttttgcgataatccctttgactccctaatcattttaaatgttttacctaatgtttttttcatattccccctttatttcccaaaattgcatatatgtaatatctacttatttcccctaaaagaaggaagcatgaaatcttaaaacaatcgttacactcttcactacttcgtcacttattttagcaacctaatgttacagcaataatatattgatatatcaaactaataatgaatccaagagatttttacaaaaattaaatttctaattttaggcattttttagtcaattaggccataaaaattggtataacaaaaaagccaccaagccctatttaataggcttagcagcttttttctataagtatgtaggatataaacgttaatttagcgatatgatgatattacgtttgtttactcagcagagctagtttctgttttggcaacagttgcatcgtcagatgtcacttgtgtctcatctgtactttcactttgctcatcagaatcttgtatgtttacaacagccacaccgtctgcaccaaatgtgtattcaacgccgtcaactgtgagagtttggttaacgaccatttcgccagtctgtgcgtcatagtaacgtttgttgccgttgtcgtctgtgacaaagacacccttagcttgaacaccattttcgtcaaagtagagttgttgtccgttgatgacttgctcacccgttacgacatgaccagtttcatcgaaataataccagtcgtcgccatcagcgataaatttattttcagcaaggtcacctgaatctgggtcgtaaaaatgacgatttccttcagcgtctgtggcgaagatacctttggcttgtaatccgtctgctgcaaagtagagtttttgaccgcgaataacttgcgaaccagttgccaaattaccattttcgtcagcataataccaatgattatcacctgttgtgaagaaatcaccgacaaatttttcacctgatttggcatcgtaataactgcgtgtgccgtcctcatttgtcacaaagacacctttagcttgaacaccattttcatcaaagtagagttgttgtccgttgatcgtttgagcacctttaacagctacaccattgtcatcgaaatagtaccaaccaccgttaacaagggcaaattcaccagtcaccatagctcctgaatcagctttgaaataacgtgtgttaccgtctttatcggtaacgagttgacctttaatttggttaccattgtcatcataatattgataatcgttgccaatcttaacaagaccacgcgccatgacaccattttcatcaaagtaacgccagtttgttgtcgttttagtcacgccatctactgttgatgttgtctcaaaagcatagtaatgaccagcataacggttaccagatttaccaaagtaatattgattaccattagcatcttcatagatagcatcacgaagttcgataccatttggcaagaaataataagtttgaccgtcaatatcacgcatacctgtcaccatatgaccattttcgtcaaagtaataacggttgccattgtatagaacaaatgaagatttggcttggtaaccacttgttgagtagtaagtcataccagtaccgtcataatagaaaccagtttgcgctgtatctgatgtcatttgttttggtaagaatgcaccattttcagtcacggtgaaatatgttcctgttgcagcgtcatttaagacataatcagcacctttgccaagaatattggtaccgttgaagtactcggctttccaaactttaatcttagttgatgggtcaattgttttaccagtcgaaatcatgactttttcaaacaattctgggtagttttcttgaaggtattctaagaattcaccaccgtattgtgcttgatagtcctcaccactacttttagtgtttgcggcgtaaggtttgtttttgatttgagcgccttcgcgttcttcaccgtaatcgttaacacgtgttgctgtgacgatttcttcacctggaagagcgtaaatttggtctggaacccagtcagcaatgacttggataccacgcgcgtggagcgctttgatagcatttcgtaaatcttctgctgaaccgtatttattgtttttgctcattgccaagtcataacggtctgtgaaagcataaccgttttgaatgattgaatcaaggaaagttccatcggttgatgacacgtattgtggtgccaattcaaatgatgtgattccccatgaagcaaacaaatcagcattttcagcaatgactttgttagtgtattgtgaagggtcttgaacaaaatcttggaagtttgagaaaccttcaaagataacttgtgaatcaagcgcagcacttgtttcgtaagtcaattcaccgtcttttttagcttctgtgcttgctttgacacgaatgtcttggtcagcagctgcaccaactggtacccaaactgtaaggaaaccgttcatatcaacggtttcaaaacctttgatttcatcacctgtgaaataaatataaccattttcatcaacaagttttgtgatgtcagtatcagaatcgttaaggaaaacttgcaaaccattttctgttggagagagcaatggacgataatattgaccagcatgagcaagaccaacttggacagcaattttatcagaactgtttaatttcagatttggattgttagacacaattgtcacaatacctgaagttgtcacagaatcgtcagttgctttttggtcagctgtcataataccataaccaaaacgaacagatgtcaaaatgcctgcaccagctccgtctgggtattgaacattcattgcttgaccacccgcagcgtatttaatacgtgatttaagtaatgctgtgatttggtcatagtatggtgatttaactgccatgtattgaccattatcagtaaacaagtcaccatagtaaacacgcggcacagattccatatttgtcaaaagaagcgcataagctgctggaatgttgaaatgtgtgtattttttatgaacactattcatatcagcattgtaaatttcaaaagctttttgcaattcatcaagtgtgaatgtgaatccgtcagtcttaggattgatttgaccagcgataattgatgcaataatgccttgaacttcactatcatgtgcacgaacaaaagcataagacggcatggtatcaccataagcactatctaccgtacggtcagtcatgccgaggtcattatgaatcaatgattccaaatttgtacggctatccaatggacgagtcaaagcgtcaagaaatgccatgcgaaggccattgtcaatagctagcgcagcaccatttgtatcatggttataatcaggatcattaaagctccaagcttctaggatagaaatgtgagcaagggcttgtgcttctgtcttatcaacaccataagccgcttcaaataaattagtataaatttgaagaaggtcagcatcgacgttatcaacggcatccacacgaacaccgtcaaagttggcatcagcatcaccaaagacgattttcccccagttcatgagatagtaaagttgatttaattgctctgcttgaacgacaggatttgagttgtcaacgtcattagcaagcaagaaatcataaccacctgtgcggtcagccttatgatatttggtttcaccagtttggtaagtcggtgcgcggttaagcaaacgataatctgaattagcccattctgttaaatcgctattaacgtaaaggagagcaccaccttgcaagtggtccgtatcacggtcctcagagttcatgttccatttgtcttgtgttgtcacaaatgaactaatcacttcacgcaaccattcggtacttccacgacgagcaatttcttgttcaattttcacttgaatagcttccacagcaaggttcaaactagcttgtgagtctgacgcagaatattttttatttaatccaaagtattcagacatgctgttcaaatagttgatttgtgtatcaacgtcaggccaccatgccataaccaatggacggaatgactcttctgttgaatcgacccaagtttcaccattttccaaaactttagtcggacgataccaagaattggctgttaaatacccatcaaccaattcaaagcttttttcggttgaatcgtaagcttgattattttttgaaaagttatcaacaagatttgtcaatccttcagtaaatgaataagttgacgttgaagttaaagcaccagtttccgcatcaaagtaaagcaattgaccgttaacggtaatagcaaagtttttcttcacgctaccatctgcttggacataataatatttgccatcgattttcttgatgttatccaagcttaattggtcagttgattctcctgtttcgctaacagctgaatggctaacttcttctgccaaggcatcttttgttttatcatcagatgtttcggtttcagagttattttctttatcagcgtcagcagtttcttctgctttatcgcttactttatcagatgaagcatctgttgtagttgttgtgtcagggtcttttgttgatttttcatcttctgctgaaacagttgttgtctcatctgtgcttgttgatgatgtttgtgacacttcttctgctgtgttttttgtagtcttttgttctccttgcgcagttgtagtatctgtcactttttgtgaatcatcgctagcaatcgtagtatcttcacctgttgtgctagtgctagcttctgttactgtgtcagaattgcttgtagttgtgtccgttgcttgtgtcttgctactgtcaacactagctcctggactatcgcttcctcttgttagcgtaacagcacttgtttcgtcagctgttacgacctgcgttgaagtggcagctcccaagcctaccactaatgccaaagtagtaacagcaatcgttacccactgtttcttcactttgtgtagtttgtaatgaatctttttctccataattcctcctaataatttcataaaaaaagactacactcaaaagtatagcccaattttttcttatgttatttctttttgcaaatgtgatttttcctgtttaatttttgttactctatctgacatctgttgtgcgatagtgtaacattccaaaaatatcatgatttctgtgcatttttccatgattgtcagcccagataaattgccctttttacagagataataaccacggcaatatttgactgcattgcgcgtgaataaatccgtttcctccctttttaaattatccgcataattcagtaatttaaaagcgagcgacagccgattcttctcaatgcaaacaacaataacgttgaataacatttgattgacgagacggcgattttcaggaatttcttgataaaactgcgttcgattaatcatttcacaggcaaaaatttccactaaattactaggcatcaaggaagcgctgtaggtaaatagccatagttcgtagcgcccccattcatccacagaaaacaagtaatctaccaaaaattgaatatcttttttagcaactttgtcaaagtcatcacaccgatacaataccgatttaataacgattgtgttcaaacggtaaaatttttgttctggcgcaatagtcgtcaaacgttggtatttcgctaagtattctcgtaattttaaggtgtttttttcaagaaaagctttggcaacgtcgttttgaaaaatggcattctgattttgtaaaaaatcacgacaaacacattgaaattcttcaacagaaacgttcatattttccaaacagttatagagagtttcggcgttaatgctgcttattccgcgttcaaatcgagataactgggcaatcgaaatgatgtcgcctgctatttctttttgtgataatccttttgattcccgtagcattttaaagctttttcctaaattttctttcatagaacctccttttcccttaaatgcacatttactatcttacctctttttgggatgttttgaaagtaaaaatgaatattttcagcaaattttcaaaaattctaataatcaactctcgattttgcattaatgcaaaattttagtttgaatttacaaataacatcagtcaaaattgatgtttaagaaacaatttttaatcaatcatatccttaaaatagatttttgaacaaacaaaaaccacctagaagaatttctagatggtttcattttctgtaatttgcggatgacacttgtgcattatttgttatatctctcaataagcttatcatagtattttttctgcctaacatttccaatagggtaggctaatatacctgctaaaacaccaattatccagacctttgtccaatctctaacaaacattccaaaaagaaacatgaccacgcacactatcagccaatagcatatttgaaatttaccattagcagcattaagctccttaaggatatccacgtcatcacttgtgtggggagcgttttcaataaattctgctgctccaactactccagaggatgaacgaaaatcactactacatgcttcagctgcttttacataatttttattacgcaaaatttcctcaactgctgtccgtatgccatctacaccatcatcagtaagcaatattcctgcacccatttctgtcaccctacgtgcaactgcctgctgttcacctgtctgcggatagagcaccattggtgttgccatgtataaactctctgaaacactattcataccgcaatgcgtaatgaatacactcgccttagacaatagttcaagttggtcaacatagggataaatgctgatattatctggtaattttccgagagatgactggtcaaacatccgtccacaagaaataacgacatcaacagtcaaacttttcaaggcgctaatgcatttttcgtacaagtcaggtctatcattgataattgtccccatagcaatgtagatgagagggcgtttggtatctttagcaggatttgctttagaaaaaacactcggaccagcaaagagatagtggtccgagaagctctcagcataaggttgaaagcgttcggtcgtgtaaactacactatccgtctcgttatcactctgcaccaatgctaaagcatttttgacatggtaaccatatggctttagcgtttttaattctttagatattttgggaagtccgaaaatcatatcagtcatttctgacaaactatatttcatgtattgcgaagacatttggttgaaagcgaaagtacttgtcgatacaaccattggcacatgatatttccaagcagctaatttcccccagaaacaaacactgtctgtatagaccacatcaggctggaaatccttgaattgctcatcaagaaaatcattcataccacaagttgtacgaatagcttgaattgtcatctcagtcgtcgaaatacttttgagacgctccatttctccctctgaaagttctggtaaaaatctgtcaactgagataaatgttgcccctgttgctttgattttttcactaaattcatcaaacgaatagaagcgcacaatatttccgcgctttactaattcagctataactggcagcatgggattggtatgaccatgcgcaggtatgcaaaaacaagcaatcttcttcacttatcatcaccaccttcatcatatatcatgtcaaaaagctctgcaaaagcgcctttgggtggtatagcaagtcctttttgctcatcccccagaatcaagagcgtgtcacctgattttatcccgaaaacatcccttgcttgctttggaataacaatttgacctttttccccaacagtcgccgtccatgcatattttttatcttctgatgtcattatattaaccctctttaaatacaaaaaaagtatgatttgtataacttattataccaaaaaatgataaaaaattaatgcataactgatgaaatcaaactttttagtaactttgcaataaatagaaaaagacaatgtcaaaaagctaaccaaaagtgatttttgggtgttaagttggtgttagccagaaacaaaaaccacctagaaaaattctaagtggtgttaaatctttcgctgctgcttctatcacaacagctttttgaaaaattagaagttacagatgtgcgataactctcaatctgcgataatcagcaacccattctttgccattccaaagcgattcttttgttaatttatcggcttcttcaatgatttcattctgagctttttcaggtattcgttccaaatctgatgcaaaaaattgtcgcatccaattggctaatcctttctccttgtcttttaacggcgttggtcggtcgtaatcatatattttctcaatcacaaacttattcttttccaataaatctgcaaactcttgacttgttggaaaattgaacttaggtttgtaatcatacccaaaatctcggcaagctgccataaatgtattctcgattgttgcaatattaccatttgctccgaattcacatatcaataaaccatttggtttcaagactttatgaatctgttttaacaaagtattgtggtcagctatccagtgaaaaacggcatttgaaaaaacaacatcaaattgcttttcaaacggcaaatcaagggcgtcaccaaccacaaactgtatgtcggcgtagtgctctcgtgccttttctatcatactttcagagctatcaagaccaatcgttgtatccgcaagatctgccaattgtgaggtaagcgttcccgttccacaccctaaatctaaaatatgttgatttttattcttaggtacaaactctaaaagtcctttcccatattcagccacaaaatcatgtttattatcatataataccgcattccactcgctcatatattcctccacaaagtctttttatccttaattatacagcaatcaattgcattgtaaagtgaaaatacaatatattgaaaaccacgctctaaattagacaactaaaaacgataacaaaaagctaaccaaatctggctagctttctttatctccagcggttcgctgttaactcatcacgtcgtcgctttttgctccttgttctgagacagctatcgcaggggtagtactaaagatttttattgcgacttcgtcgctaaaaatctagtactactcccactcagcgattcaagttaaccttgattcaattcaattgcaagttcaactttcacatgcagaggggttgacatcaactctgatgacgcttcgcttatcaatcgttgtgtcaaacataaaaaattagccaaatggctaattttttattcccactctactgttgctggtggtttacttgtgatgtcatagacgatgcggttgacgtggtcaacttcgtttacgatacggactgaaattttttgaagcacatcccatgggatacgtgcaaagtttgctgtcattccgtcgattgatgtaatagcgcggattgcgattgtgtaatcgtaagtacgtccgtcacccataacaccaactgaacgaacacctgtgttaacagtgaaatattgccagatgtcgcggtcaagacctgctttagcaatttcttcacgaaggatagcgtcagattcacgaacagtttcaagacgttcagctgtgatttcacccataacacggatagcaagtcctggtcctgggaatggttggcgccaaacgatttcatctggcataccaagagctgtaccaagcgcacgaacttcatctttgaaaagtgtgttaagtggctcaatcaattcaaattgcatatcttctgggagaccaccaacgttgtggtgtgatttaattgtttgggcagtatctgtaccagactcgataacgtctgtgtaaagagtaccttgtgctaagaagtcaacacctttaagtttgcttgcttcgtcatcaaatacactaacaaattcattaccaatgattttacgttttttctctgggtcatcaacaccagcaagaaggtctaagaaacgttttgaagcatcaacacgaatgatgttcaatccgaatttaccaccaagcatattcataacttggtccccttctcctttacgaagaagaccatggtcaacgaagatacatgtcaattggtcaccgatagcacgttgaagaagaacaccaacaactgatgaatcaacaccacctgaaagtcctaaaagaactttacggtctccaacttttttacgaatttcagaaatttgcaaatcaatgaaattatccattgaccaatcacctttagctccacaaatcttgaaagcaaagttacgtaaaatatcattaccatatactgagtgacgaacttctgggtggaattggataccataaatgtttttctcagtattttcaatggctgcgtaagggcaatcagcagaatcaccaacgaggtggaaacctgctggaatttcggtaactgcatcaccgtggctcattaaaacggtttgttcatctggtgtgtcagcaaacaattttgaatttgcttttaagcgaagtgttgattgaccgtattcgctgttaccagtttgacctgctggaacaactttaccaccaagtctgtcagtcaacaattgcataccatagcagataccaagaattggaatacccaattcaaaaatttcttcatcaataccaaaggcattgtcagcataaactgaatttggaccacctgaaagtacgataccaattgggttaatcgcacgcacttcttctgctgtgattttgtggcttctcaattctgagaacacaccaaattcacggatacgacgtgcaatcaattggttgtactggctaccataatcaagaacaatgattttttgaacatcattcaaactagaattgtcagtcattattaccctttctattaaagtcagccctaagctgacagtattctttttaattgtagcataatttcatgcatttagcagtagattttcaatatcttttagcatacaatcataatttttcaataggataataagaaaataactattatcattggataactcttgtttcagtaaggtgtttataccagtaagcacttttctttggataacgcttttgtgtctcaaaatcaacatagaatagaccataacgtttctcatatccattagaccaagaaaatacatccatcaatgaccagataaagtatcctttaacatttgcacctgcttcaattgcatctgaaataacttctaaatgtttttttacataatcaatgcgagcatcatcgtaaacggtattgtctacaaattcatctttatagcctaaaccattttctgtgatgtaaatcttcttatagtttggataagcttttttcacgcgcatgatctgatcatataatccttgtggataaataatccagtcccaatctgtcttaggaacatttaccggggcttctctacgaccaatccctttaatctgatacttagaacttcctttctcaccttttccattatgaatgatttcagtgtcaccatcacaagctcgcatccagtcactcatataataattaatccctaaaaaatcatttaagtcctttgctgcttcaagttcggcaaaatcttcttcacggagatctaattctccaccatttacttttagaatgtgattaacacccttcatcgtttcctcagagtagccacctaaataagttgcatccaaaataaatttattatggagtatatcttctaactcggcggcacggacatcttcaggattttctgggttatacgggtatttagttggcaaagcatgaacaacaccaatttctcctgagtaccctttatccttatataatttaacaacacgtgcatgagcaaccatcatattatgatgagactgaaaaacttttgccaaattatactggatgcctggaggaaatttccccactaagtactgaccatctccgattggaccaatttcattaaacgtcgtccagtaattaacctcagagaattcttcaaaacaaaaatcagcataattaacataatgatctatattttcacgattaagaaaatcaccattagagtgtaaagctaagggcgtatcaaaatgatgaagtgttacaaaaggttccacatggtgcttatggcactcttcaaacagtttatggtaaaaagccacacctttagaattaacttcaccatagcctttaggaaaaattcgtgaccaggcaattgaaatacgaatgccattcacaccaaactgctctgccaattccaaatccacaggatactgatgatagaaatcactagctggatcagctgtataccagtaattatctttcagatattggtcccaggcaacaggaccttttccatctacatgagtcgcaccttcagcctgataagcagctgtagcaccaccaaaaataaaatctttaggtaatgtttttgtcatattctttcctttcgatatcaatagcatttgagatgaataatagtcaaaggaggtgaactatcattcatctcaaatattgctaactaattagttaaactgttcttgaacaaaggctaaagcggcttgtccatcacgggttaatttaatatactgagcaccttcagttttagcaagcctaatcccaagattatcagtctccactttcatatcttcatagttagatgccacctgtggtgcaagaataactaaatcaaactctggtaatatttcacgatgagcaccatatccacctgcggctgctttaacaggtacgccatattctgcagctgccttattaagagcatttgctaaaagtccactagtcccaccacctgcgcaaaggacaagcacgttggtttctttgacaatattgttgtgaaccggtgtttcttcactgcccactcctgctttttcaaggatagcatctgctttagaagtattaaagtttgcgactaccttttcttttagagaatcattagacttccctgtacgttcttcttctagaatctgttggtcataaactttgacaaatggataatagattataacatcaatcacaatcaggagagccgccaaaataaatgaaagaagttgaaaattagtaccaagaacgattcccaaaggtccaggagtagtccatggtaagttagtcgtgaaactattcataccaagtgtatcaacaaagaatttgaaaatccaaacgttaacaatgggtgctaaaataaatggcacaaagaagacagggttcaaaacaattggagctccgaataaaattggctcatttaccccaaagaaagttggcacgactgaagcacgtccaatagccttattacgttttgattgacatagccacatgaacatgaatggaacgacaagagttgctcctgttccccccatcgtaacgataaacatttgtgttcctgaagttaaaactttatcagcgtgttccccagctttcataagagctaaattcgtatcaatattagcgtaggtaataaccgcaatagctggttcaacaattgatggaccatgaataccaacaaaccagaagaaagcataggcaccaaatataaaagtaataccaacataaccatctgctgcagaaaaaagtggtgcaaaaaactgacctatcgcttctgccacacctgttcctacaaaatgacgcgctaaaatatccaaagcataaagaaaaactactgataaagtaaatggaataacatctttaaaaacttgtgaaatgttaggtggtacttcatcaggcatacgaatggtaacgttatttttcacacaaaccttatagatagtcacagtaacaaaagctgctaaaaaggctgtcagaagtcctttagttcctaaaaatccagttgcaaaaccatctgctgtaggatctgctgccaaaatcaatagacttacaatggaagccagtaatgttgacatgtaattaatttggtttgttgctgccatgtcacgattaacagaatcagtcaatgatttagccgtagttccagcaaccaacattgctaagagtcccattgaataattatatggtttcatcaagagagtctcaacgcccgaaggccaataaaaaccaaaagcatttggcacataggcaattaagataaaaatactagaaaataagataacaggcattccagcaatgaaaccatctcgaatggcccttaaataaatattacgtgataacttttcaaaaaaaggtttgcctttttcaataaactcaattaacttattcatattttactcctcttttatataactcaataagatattgcattaagtcttttagtaacaaggttgtcatcaagtgatcctgcccgtgcatcattgttacactataagcaatatcttcacctgatgcttctttagtcaataaatttgtttgtgctttatgcgcctcaataatacaattctctgcttcttttacgagcccgtctgccctatcaaattctcccctctctgctgccttcaaagcttctaacaactttgtcctggcatcaccagcataggctacaatttcaaaaccaagtaatgttacttcttctctattcatgataaaattctccttaatcattattataatagtcgttgtatgtgtaaaactaaaaacactttctcacacttataactttctacccccacttctcgggtgacaatatcataaatatcactaccaattcgataggctaaagggtaagttaatcttacttgcttctctatctccatcaatgatttattttcgttttcacttcgatctaaagaatctaaaaaataattcaaatgaatcataaaacgatcataaaaattactgttttcacttgtccgtttgatattgttcttttccagaacaccatcaattaaatgtaaaatatttttccttacttctaaattcttctctttttgtaatatcatcactccttcagcattcataaagtgataagcaatcctgctaacttcttcattaggaagcgactctagtaggttcttacgataaatatcaagtgcttcttgccctatttgatagggaataggatattttgaagaaacatctggaagactactgggcttatactttccagccacaagggcttgatatgagcaataaatatgatctgtcaatgtcacataaatatactcctgtacaggatagtgatatttcttggacagataatctacaacatcataggtaaccgtgatgaagtctagtggtatattttttaataaagaaataaagttctcttttgattcctctgtccgaagatgaaaaattttttcaatcttttcttcattgatggtatcacctttattcttgttaaatccaataccacttccaatcaaaacaacttcttctccattcacatcttgtgctagagtaacattgttattcatagaagatattatttggtacataatccctcctgattagttaaagcaaaaaggcgtaatcatagtacaaattaaggaatacaaatccaatgattgtctttccaaattcatttatgatcacgcctaatctcgcttagtaacgcttactttatttaattatgggtttattatagcacaaccttttttgtttgtaaaccctttcttgtttatttttttgtttttttgtttaaaaatcaacaaaaattttaaaatgcaattatccatatgaaagcaaccgtaagtgcttggttaaataacccttcctaactaataaaattaaggaaaagattttgtttaatacattaaatagaaacactctcctaaaatgaaggtgagacacaaggggcaatgatcccatttcaaccatctatcactggatttagcaagggcatgggtcttaccaaaggagatatactttgccttgcaaaaggaaggataaaaaaagcaagcggctggaaaaccacttgcttaggagttatatgaaaagtttttaggatgattatattatatgactttctaggataggatacatccgtcttaagacctattttttaaaaagtgataaatgaattttaaaaagttgactgatgttagtaaaaagttttacaataaatatcattaagtaagattggagatgagatttctgtttaacaattacaaacttgtgcagcgtttgattcatatcatttcagctgttgtttttatcgcttcttgtctctttatgatttggctttatcagcatggctatctaactaatcaagccaaattacaaacgcttgtggggcaagataaatttttaggggcacttttcttcactcttttacaaatgatgcaggttgttgtgccaatcgtccctattagcttgactatggttttagctgtcatgacttttcatccagttgttggcattttaacgagttgcattggtattatccttggttctactattttatttttactgacacattggtatgggaaacgattttgcctgctttttgtcaaagaggaaaccttcaaaaaatatgaaaaacttgttgccacccataaatcctttactatcatttttattttatgtatgatatcaccctttgcacctgctgatttacttgtgatgttagccgcgcttagcaatatgtccttcaaaactttttcaaaaatcattatcctctgtaaaccaatttccattatcggacacgtgttaattctcatttacggtggtgaatgggcactacattttctttagactcaaaaaatttgagatctgtttctcagattttttagtttctctcaaagtctaattgaatcaagacttttttatctggtaatcgataacgtgatgtttttatctttatgtaaccaatattggacattatttccgttaatttgcttgtttcaatctgatgatgaacgctgtctagacaatcaaatgaatgcaagtaaggtgaatcagacacccaaacatccttttgaggattctgctgaataatacaagacacgtattttggagcaactttttggattatcttttgaaaagatgaataaccaatatattcaatcaataaattagcaattactaattccgatcgagggagatttgctaggtcagctgttaaatcaacacgtctgcaatccaaaatgtctgccaaatcaacatatcgttccgctgtttggtccaaataatgctgattaacgtcaatgccatagactttcttgaaccttgttttttgaatatgttcaagtccatttccaccagcaactccaagaatcatcacactagatacaggataatcaagttgccctttcatcatctgattcattgcttgtaattgactgacagaagccagcttcatgtgattttcataatcatctagcttaattgtttcccatggatttttcatcattcctaaactcctctttacatcattttagaaaatattataccagaattctttgcttgttttgataaaaagagatatttttattacgcaaacgcttgcgttattttatctttttggtaaaatgaaagaaaaaagtctttctcctaggagctttattatgacaaacgaaactttgatgcaatattttgaatggtatttaccaaatgacggaaaacattggcaacgattagcaactaatgctcccgaactagctcaaaaaggcatttctaaaatctggttacctcctgcttttaaggctacacacgctggcgatgttggctatggtgtttatgacctttttgacctcggagaatttgaccaaaaaggaacgattcgaaccaaatatggaactaaagccgattatcttgctgccattgctagcttaaaagaaaatggtattgagcccttagcggatgtgattttgaatcacaaggcagcagctgaccacaccgaaacctttactgttgtcgaagtatcgccagaggaccgtacagaggttcttagtgaaccttttgaaatcgaaggttggacaaattttacctttgcaggtcggcataaaacctataatgattttgagtggcattggtatcattttacaggaacagattatgatgtcaaaactggaaaaactggaatttttcaaattcaaggcgacaataaaggttgggcaaatcaagatttagttgacgatgaaaatgggaattatgactatctgatgtatgctgatttggatttcaaacaccctgaagtcattaaaaacatttacgattgggcagattggtttgttcaaacaactggtatcgctggttttcgattagacgctatcaaacacattgattctttcttcatgggcaattttatccgtgatatgaaattaaaatacggcgacgatttctacgtctttggtgaattttggaatggtgatgaacagtctaacaacgattacttggaaaataccgattatcgttttgatttggtagatgtccgccttcatcaaaatctctttgaagctagccaagaaatggaagcttatgatttgcggacaatttttgaccaaaccttggtcaagaatcacccagattctgccgttacttttgtcgataaccatgacacacaacgtgggcaagctttggaatcaaccattgcagaatggtttaagcctgctgcttacgctttgattctacttcgtcagactggattgccttgcattttctatggtgattactacggcatttctggcgaatttgcacaagaaaatttcaaaaaagagattgaccaattgttgcaacttcgtcaaacagctgtctatggacaggaagaagattactttgatgacccaaattgcattgcgtggacttgtcttggggatgatgaacaccccacagcactagctatactcatcagtaatgctgacgctgcttcaaaacgtttatttgttggcgagaaatgggctaaccacatttttacagacgccttagaaaataatcagaccgaggtcaccgttgatgcgcaaggctatggcgtttttcctgttaatgaaaaatctgtcagcgcatgggtgccaaatcactaatgaatacaaaaaaactcccttagaatagcgatttctaagggaatttcttttctaatttaaactgagaatcgaaaaattcttacatctatttacataattatatttacgtaaacaacaataacaactttcacatcttttctaccctgcttgggctgtttgcatttggtaataaacgccttgttttgccattagatcgtcatgcgtaccatgttcaacaatgtcaccatctaccatgactaaaataaaatcagctgattgaatggttgacaagcggtgtgcaatgataaaacttgtccttccttgcattaatttttcaaaagcttcttgaatcaatacttctgtccgagtatcgatagatgaggttgcttcatcgagaattaagatttttggtagtttgacaaaaattcgagcaatcgttaacagctgacgttgtccttgcgacaatgacgctcctgcatcagccagataagtatcgtaaccatttggcaactgacgaataaagaaatcagcattggctgcttttgcggcagcaatgacttcttctcgtgtagcatcaggatttccatatgcaatattatcgtgaatcgttccaactttcagccacgtttcttgcaataccataccgatttgttggcgcaattctgacacagaataatctgccatagaaacgccatccaaataaatagctccgctattgacttcataaaaacgcattaaaagattgattaaagttgattttcctgcacccgttggtccaacgatagccacttttgaagccgctgggattgataaattaaggtggttaatcaaggtattttggctagtataaccaaacgacacatctttgaattcaatttgtccttggatactatccgcgttaagctgagcttttactggaagaggctcattttcttcgtctaaaatagcgtagagacgttctgcacaggcaatggcgctctgcaattctgacaaaacggatgaaatatcattaaatggcttggtgtattgattgacataattcaagaaagttgtcaattgcccaactgtaaaagcacctgacataatccgaagtgcccctactcctgccaaaagagcataaatcaagctattaatgaaacgcgttgacggattaaccgttgaagaatagaaaatagctccttgtgagtaatcagcataagtatcattaatcgtcgtgaaagtgttaatagccatatcttgcgcattgaaggtgtggagtaaactttcttgacgaatcatttcttcaatatactgcgtttgttgcccacgtgattttgtttgattttgataaagatgataactcttttgagcgataaaacgcgctaagaaaagtgataatggtgtcaaaattagcaccaaaccaagcattaacaaatcaatatcagccattgtcacaatggtaatgataatcgttagaataccaatgaaaaattgattgaacaccattaacagaccattgctcaattgttctgcatcagttgtcacacgactaaccaaatcacctgaacttttcttgtcaagataagaaataggcatctggtttaatttttccatgactttttgacgcaatgtgtaaatataaccaaacgttagacggttataaatcaatggattcacccattgcaccaaggtattcaaagcgacaacaacaatcattttcgctacaattggcacaattaaactaattgatttcggagataaaacaacgtccaccgcattcccaatcaaaataggcaaataaacggtcagagcgacttgcgcaatcgttccaagtgtggcaccaagaacaagtcctttttgtgataaaagatctttgaacaaacggcggctagtatgattttgattttttgccttcatcttacgcctccttttcttcttggtgttgtgagtaatgaatagcgcggtaaacatcattttgcttgagtaactcatcatggctagcaaaaccaagttgatgtcctttatctagtagcaaaatcttatcagctgctttcaagctattagtgcgttgtgaaatcaaaacaagagtcacttcttttaattcctcatgaatggctgatagcaacttcgcttctgttaaataatcaagcgctgatgtcgaatcgtctaagattaagaacggcgcttttctaacaagcgcacgcgcaattgtcaaacgttgacgttgtccgccagagaaattacgcccaaatgcctcaaccttggcatccaattgtccctctttttctgacacaaaatcgctagcttgagcaatatccaaagctctccagagctcattatcactcacttcatcacgaattcccaaggtcaaatttgaacgaattgttccttgaaataactctgccttttgtggcaccacattgacccaagaacgccattccccaagtgttttaggagagtgctgattttgaaaaatagctaagcttccctcttgcggtgtgtagagatgagtgagaagttcgactaaagttgatttcccagagcctgttccaccaatcacacctaaaaagtcaccagcgttcacactaaaatcaatatgtgacagcgacggctcggcagcggttggataggtgaacgtcatgtctttgaccgccaaagcaaatgctgactcactttgtaccagctcagttgccaaatcttcagaatccttttcaaatacttctgtgatacgttcagcgctgataaaagattggttcaatgatgtgacaagcatggtcatcttgagtaattccgtcaaaatttgcaacaggtaattcaccaaagcaatcaacattccttgtgacaaaagcccacgaccgatttcaagatttccttgccaaatcaccaaaatcaatgtgccattaaccaccagataagtcaacggcgttacgagacttgataggtgaccagctttaatttgcaagtcagtataatcttggttggctgtcgcaaattcttgttcttctgctacaacctgaccaaaggcacgaatcacacgcacaccttctaattgctggcgtgtcatattgacaattctatcggtagcctgacgaatctttgcgtaaatcggattgagcaagtgcgacatggtaaagacaatcgcaaacaaaatcatcaccattaacaagaagtcaatcgttattttaggactaatggtaaatgccataataatcgcaccaaaaacaataatcggtgctcgtaaaaacagacgtaaaaattggttgatacctgtttgaatttggtaagtatcgcttgtcaaacgtgttactaaactagatgttgtcagctggtcacggtcctctttactcaagcccatgatttttttaaataaatcctttgtcaactgacgtgtgtagccaacggcagccttggaagaaaaatattgtgccgtaatagccacaagcaccccaacaattgccagtaaaaataacagccctatcatcatataaaggtgatttttatcatgatgagggataatggtatcaacgattctagcaataataatcggaactagaagctcgaaagatgcttcaaacaatttgaaaaggggacccaagattgtctccttgaggtaccctttaaaataatgacctaattctttcattcttctcttttctaatagagcattggctctcatgtcattttaaaacaaactcatcaattcaatcaaatacagattaaagtgaacttcgcgagaatagtaaatattcccaccatttttatataattttccgcctgagataagggcaaggggatgatagtaaaaataagtttctcccgttgtatttccaagacttggagcgacaacatcacgagaataagccgttgccaaagcaatcgtattttcgccaccattttttgccacgtaatcaatataagcagttccgaaattgtaagcttgcacagctgtccaaacatctactcctgcttcatctgccaaggtaagattttctgaaagtaccgtcacgccttgacgaatactggtctggctatccgtaatggaattagcaacaccgtctgaactttcgcttgattgcataacgtcaccgtcatcgcctttggtctccgtgtaaatcatcgccaagaccaaatcaacattggcggtggtatcgttgtcgtctaaaatctccttgaccatatctttatactgtaaaacattttgcacgtttttgtgaaccacatacgtttggtaaccacaaaaaatgacaaagcccagtatgattaggcgtcttaagaacttaaacattatttattttgaatatcctctatatttttaatcaagatagaataggttccatttggattttggataaattctaccgattcagcgtcgtcatagacattattaggtacaatcagttgaataccattggatagggataacttctgattttccaattttttcgtctgacgtgaatggtcaatatctgctacctgaattggttcgggaatactttcttttaactcatcaacaaaagttaaacgagcagtcaaattactatcaaaaagttggtctgccaatttttctggcgataattcttgctcttcttccagatttttatggatagcagctttcattttggattggaaagcaaaatcatcttgttggaaattttcagcaattttctgcgctgtttgttcaaccatttttatcgattttttcaccgattgctctggttggacttgcaagagattttctgaaaaataattagcaaagctaccattatgcttgatacgcttctcaatcaaataataatgatgattagagcgattaatcaccaaagcttcatctggtgtttgcgcagctgacggcagattattttgtgtcaccttaatcggactttcactatcactagaaatatgggtgaaattttccttcaaagcaatacgaagaaaggcaaaatgttcaacaccgtctttgtcaaattggataaaaaccaaatcatttgttttttgattttccgagatgacaaattcttctttccaaagttgggcaatcttaacagatgactccatcaaatcatcacttaaatagctaagaaagacattatcttctgcaaacgttccacgtttagcttcatctgagaaaactttgcttagttttttacgaaaatactcatcaatacgtggcgtgattgtcaacaattgatctgacaaaatcagctcagtatcgttgggtgtaaattgatgaataacaatgcgtttaatatataaatcaatcatggttagttttgtggttgaatacccaaatagtattcaactgttcgttaataaagcgggaaggcatctgtcaatgctttaacctcgcgacgaacctcctctaaaatagtttcgttttgataattttcaagtgccttaacaatcaattcagcaatagcacgcgattctttttcatccatgccacggctcgtaatggctggtgaaccgatacgaatacctgatgttttaaacggtgataaggtttcaaatggaattgaatttttattgagcgtgatgttaacagactcaaggacattttgcgccactttcccattttcaacgacttttgtcacgtcaacaagaaagacatgattgtctgtgccgcctgaaatcacacggaaatttgggtgttgattaaagacatcagccatagcggcagcatttttaatcacattttcgccatattctttgaaagcagggtccaaggcttctttgagcgcgacagctttacctgcaatgacatgcatcaatggtccaccttgcaatccagggaaaacagcagaattgatttttttagcgagagcttcgtcatttgtcaaaatcaatccaccacgaggacctcgaagcgtcttatgcgtcgttgtggttgtaatatgcgcataaggaactgggcttggatgatgacctgacgccacaagacctgcaatgtgcgccatatccaccataagataagcaccgacactatctgctatggcacgaaaacgttgaaaatcaataatacgtgagtaagctgatgctcccgcaacaatcaattttggtttcacttcttctgctagctcggctaatttatcataatcaatgcgttctgtcacagggtcaaccgtgtaagaaataaagtgatatgttttccctgaaaaactaacaggagcaccgtgtgtcaaatgtccgccagcagccaaatccattccaaggactgtatcgccaggttgaatcaaagccatataagctgcggcattagcttgacttcctgagtgaggttggacattcgcaaatttagctccgaacaattcttttgcacggtcaatcgccaaattctcaacgatatccacacaatctgttccgccataataacgtttgccagggtagccttcagcgtatttattggttaacaatgtgccttgagctgccatgacagcttttgaaacaacattttcagaggcaatgagttctatgttattttgttgacgaacttcttcagcatgcactgcttcccagagttctttgtcaaatgcttcgtagttttccttgtcaaaaatcatatccttatctcctttttgataagaccatatcacattacttaaaagcttagtagctccaagatgatgtaaaagccgaaacagtatgagaagaatttcccaaaaatcactctttcgtaaatgttaagtcaggcacaactgctaataggtcgtttttggtaatcgcaccttgacgtaaaatacgagcagtttttccagataaatccaaaattgtcgagtcaacccctgttaaggcagcgtcgtcagcaaaaccagtcacagtaccaccgaactgtttttgaatttccttgaaaactttcccactttcttgtccagaaatgttagctgacggaccaattaaggggccagctttcttaatcaatttcaaggtttgtgggtgattgggaattctaaaaccaattgttgataagccagaattgatccaagctggcacgcggtcattagcttgtaaaataatggttaatggaccaggtaaaaaaacatcataaagctttttgagataacttggttgctgttctgaaaaagctaaaattgtctcaaaatcagctacgttgagattcatcgccttgtctttaggacgacgtttgagttggtaaacatgctcaacggcattctcattcatcgcttgggcaaaaagcccataaacggtttctgtcggtaaaatcaccgctccaccattttgcaaaattgtttctaaatcagtcattatccatcacgaccattctatctttaccgaacatatctttaatgacacgaacgcgtttagcaggaaaatgcttgctcaacaaagcacgcaaaccttctccttgtttataaccaatttcaaaataaagttttccgttttcggtcaaatgctcactagcattctcaataatctgacgataaatggcaaagccatcttcacctgcaaaaagtgctaaatgtggttctgaagcaagcacattaatgccaacttcatcttcatcgtcataagcaatgtagggcggatttgaaataatcatatcaaatctttctgtaatttggctaaaaacatcagattgaatcaaggtgagctctacttgatttttgagggcattttctttcgctaattgcagggcgtctgctgaaatgtcagaggcggttacttgccaatttggtcgcgcagccttgagcgaaatagcaatcgcaccgcttcctgtaccaatatctaaaactcgcaagtcagctctgctattttcctttaaaaccaaatcaaccagctcctcagtttcaggtcgtggaatcaaaacacgctcgtcaactgaaagctctaaatcgcgaaaataggccttcccagtgatgtactgaggtgagcgatgttctgtcaactgagccatgatttgctcaagtaacatttggtctttttcggtgatagcttggttctgatgtaagatgaaatcaagcaaggtccaaccttttaattcacggaaaacgtaagtgagattttctgggtcctcgccgattgcttgtaattgtttttctagttggctgattgtttcagcgtaattcattattgatttaactcttctaatttcttagtttggtcaaaaagaataagggcatcgataacttcgtctagttttcctgacaaaatcgtatctaatttttgcaatgttaaaccaatacggtggtctgtgacacggttttgtgggaaattataagtacggatacgttctgaacggtcacctgtaccgattgttgatttacgttcagcgtcttgttcattttgagcaatttgggcaaagtggtcagcaacacgcgcacgaataattttcatggctttgtcacggtttttctgttgcgtacgttcttcttgcatttcaactttaataccagttggaatgtgaaccatacgaacagctgtcgcaactttgttgacgttttgtccaccagcacctgatgcgtggtaaatatccacacgcaagtcttttggatcgatttcgtattcgacttcttcaacttctggcatgacaaggacagttgctgttgaggtatgaacacgaccttgactctctgtgacagggacacgttgaacacggtgagcgcctgattcgtatttcaacttagagtaaacagattgaccagataccatgacaacaacttctttgatgccaccgacaccgttgtaagaagcttccatgacatcgaatttccaaccttggctttcagcatatttttgatacatttgaagaaggtcgccagcaaagagcgcagcttcgtcaccaccagcagcaccacgaatttccaagatgatgtttttgtcatcatttggatcttttggtaaaagaagaattttaagtttttcttcgtattcttctttggctgcttttgagtctttgagttcctctttcgccatttcttcaagttcaggatcgccaccagcgtctttaatcatttcttcggcatcttcgatgttttgaagaatttgtttatattcgcggtaaacagttacggtttcacgtgtgctcgcttcttccttagacaaagccataaagcgttttgtatcgctaacgacatcagggtcagatagcaattcgcctaattcttcgtaacggtcctcaaccgcttgtagctgatcataaatgttcatttgttttcgattaacctctcttttgcaaattcattttcttatttttctttggaaatcattgggttaaaataatgtttacggcaaacggggatataggtttcgttgccaccgatttgaatttgatttccttcgtaaacaggcttgccattttcagttcgcaaaaccatggttgcttttttagaacaaaactgacaaatggttttaatctcgtcaattttatctgctaatagcagtagatatttggagccttcgaacaattcgttttgaaaatcattttttaacccaaaagccatcacaggaacgtccaaatcatcaacaacacgcgccaaatcatagacatgctttttcgttaaaaattgacattcatcaattaaaacgcagtatggtttttctggcaattcttgaataaaagcaaaaatgtccatttcttccgtaatagcaatcgccttgcgacgcataccgatacggcttgaaacaacaccataaccatcacgcgtatcaagtgccgaagtcataatgacaactggtttgccttgttcttcatagttatgagcaacttttaaaatttcaatggtcttaccagaattcatggttccatatttataatagagttgagccaaaagtgacaatcctaccttctactaatattcttctattctaccataaaattgcctagggttaaataagagaaactagcatttagcataatagaccttacaaacctttaaatagacgaagctaatcgctacaacggacgaaaaaacttgtttacagcaaaaaagccaaaaaaccaccgtttcctaactcatcattcattactactaataaaacaaaaacacacataggagcgacaaaatttgccgctcccacgtgctgttaagttgttaatgctcgctattattataacatagacaatcatgttgattcaatgacacattgttaaaaaaatcactattctgttacaaaattgtttttaaagttgatttttcgggcttaaaccgatagaaattgtattgactaaacaaggatgataaggtatcttattagttaatataatatgatatttaagcgatttaaaaattgctaggatataagaaagttggggagaatatggaaactattttttggatttttgttatgatagtcgttattgctttcatagttcaacttctaccatatatgctgatggggttgggaatttactgtctatatttacttattcgttatatccgaaaagaaatatattttagaagtgatgaatttttaaatcacaaacaagaaatttctaatatggtaaatgaatacaacgaaatttctaactacgtgaattcctttgaaacaattagtctaaaagctgctaaccaagatcgttacaaatatgctgatttagcaacatacgagaatacaagtaaacataacataaaacgaaatagaaatactactgatgttactcttgataatgtctatcaagcttctttagcagttgtaaaaaaagcttctgaggaacctttgaaatacttgtgtaagtactttgatttcaaacctaacgaaaaaaatttagcttatattcaagacattggagaaactgtatcacgatttgtaaatgccaaaaataatcttgatgctcgattagagaaaatcgtttctgatttcaatcctccaaaattcattcttaaacactatagagaagaattacataaacatttagaaattgaaattccagaaattacatttacttttcctcagtataagtttgaatatgtcagcccaggtggaaatagcagccaaagaactaccattactctcgatgagctgactattgaatctttaattgaatacatcgccgatcgtgttaaacaaggaaagactgctaaggcacaacgagcgcttatgacgaaaaaacttcgtgaatttattaaaaaaagagacaattatacctgtcaaacttgtggagcttctattgctgatcaaagtttgctcttattagaagttgatcacattattccagtctcaaagggtggtttatcaaccgaagataaccttcaaacactttgttggaaatgtaatcgtactaaatcggataaaattattgaacaacaatagaaagcaatattgattaagaaaggttacgattatgaaagttggttttcgaaaaccaagtttaaaaaagagtttgaaggctcgaacaacggcaaaatggaaaaggcaaacaaaaaaagccatcatccctggctatggtaaaaaaggaacaggttggctaaaaaatcctaaaaaagcagcctacaataaggtttaccataaaacgacatttggtctttctgatattctgaaactctttaaataacatttacctttgaaaatgctgcttctctttcctgaaatttactgaattttctcgcaaaatatgctacaatgtttgtgttagataaattataaaaggagattcttatgccattcgtaaaaatcgatttattcgaaggtcgtactgaagaacaaaaaattgagcttgctcgcgaagtaactgaggttgtttcacgtgttgctaaagctccaaaagaagctatccacgttttcatcaatgatatgccagaaggaacttactacccacatggcgaaatgaaaaagaaaaactaaggtttgttaattttaaaacacttactgctttcctagtcatgtcgattaggaaagtttttttgtacttttgagcttgattttcgcgatagaaagcgttatcctaatttcataaaatgattttggaggtgacattttgcaactgagtcatagcgtgaagatgatgggaacgattattgatattgtcgttgattctgacactccccatcagcacatcaaggaagtctgtcatcttctaaccgtttataagaatcgctttagcgccaacgataacgattctgagctaatgattattaatcataatgctggtatcgctcctgtcactgttcatccagatttgtttgagcttatcgaacttggtaagacgcatagccttttacaacctagcaatcttgatattgctattggtcctttggtgcaaagctggcgcattggttttgaagatgccaaggttcctgacaaggaaaacattcagaaagctattgcactcgcaaacccagaacacatcattttaaatgcagctgaaaaaagtgtatttcttaatcgcaagggcatgaaaattgaccttggtgcgttagccaagggttacattgccgataaaattatggattatcttaaaactgaaaatgtcagctctgctatgattaatcttggtggcaatgtcctcgtttatggtgataatcccaagcgtgaaaatggtatttggcatattggtatccaacatccccaaaaacagcgtggcaacaatctcggcattttaacactcaaagacaaatccgttgtgacttcaggcatttatgaacgccatctacaagttggcgacaaggattatcatcatatttttgaccgacatacgggttatcctatcgagactgacatggcgagtttaaccattgtttcagacctatctgttaattgtgaaatatggacgacacgtctgtttggtctgccgattaagcaagcttttgagaccattcaaagcactccaaatatcgaaggaattatcattaccaaagataatcgctttgcagtcaccagcggtcttaaacaagattttcaattactctattcataagatacaaaaaacatttccaaggttattccttagaaatgcttttttagtttattttgtttcttctgtttttgttttaccgtttaaaatcaagttaagaacaacagcaaacaaagttgcgataacaataccatttgtcaaaaacatttgaagtgtgcttggtaggctatcaaaaagatttgttccgtcaaaaccaacaccgcaggcaattgacaccgctgcaacgataaaattgtgttcgttatgttggaaatcgacttgattgagcatttgcatcccttgaagagctaccataccgaaaagaacaatcatagcgccaccaagaactggactaggaatcatttgtgccatagcaccgaattttggaagaagtccaaggataacaaggaacaaggctgtgtagtagattggacggcgtgttttgataccagaaatacgaaccaaaccaacgttttgtgagaatcctgtatatgggaatgtattgaaaataccaccgagtaaaacagctgcaccttctgcacggtaaccattgcgaagtcgtttactgtcaagtttttcaccagtcaaatctgaaagcgcaaggtaaacaccggttgattcaaccattgaaacggttgcgatgatacacatcatcacaattgatgtgatttcaaactttggtgcgccaaagtagaatggttgtggaatgtgaacaagcggtgcttcagtaacaactgacgtgtcaaccaagcccatgaaagctgcaataattgtccctccaatcaagccaatcaaaatcgcaatagatttgataaagccttttgcaaaaacattaaccgcaagcacgatagcaattgttatcaatgctaaaatcattgattgagcagttggagaatcagcattgtctcccatgtttccaatcgcaacaggaatcaatgttaaaccgattgttgtgataactgaccctgtcacaactggtgggaagaaatcggcaatttttgaaaaaatcccagaaatcaaaataacgtaaattcctgacacaatcaaagcaccaaacatataacctgaaccttgtttagccccaatgattgaaagcggagcaactgattggaaggcacagccaagaacaactggaagcccaacaccaaagtgcttacgcaattgaagttgtaagaatgttgcaactccacacatgaaaatgtctgttgagataaggtaagtcaactgttcagctgaataattaagcgcaccagcaatcataattggcactaaaattgacccagcatacatagcaagcaagtgttgcaaaccaagaatggctgcttgtgaatgtttttgttcgttcatttccattttatgcatctgcctccataaagacaacttgtccatctttaaattctttaatacgtgctaacgatgttacagggacaccagtttcttctaataattggcgaccagtttggaatgatttttcaatgacaatcccaatgccagcaactttcgctcctgcttgaccaatgatttccaaaagccctttagcagcttgaccatttgccaagaaatcatcaacgatgagaactgtatcgtcttctgacaagaatttacttgcgattgatacggtgctagtcacacgttttgtaaacgaataaacttctgcggttaaaataccttcagtcatcgtgatatttttcgcttttttagcaaaaatcatcggaacgttcatcgcttgcgctgtatagagggctggggcaatacctgatgcttcgatagtgacaatcttagtaataccagcatctttgtaggcatcagcaaaaactttgccgatttcctgcattaatttatagtcaacttggtgagttagaaaactatctacttttaagatgttctcacctaaaacattcccatcatttaagatgcgattttccaataatttcatggattctccttctgaaaatttttaaaatcgaattggctaaaaataataacttatgatgaaacgtgattaggcataaggacacatataaaaacaaaaaagagatgtttacacatatggtaaacacctcttgttactcggtcatattttcacaactatatgcaaaaacatctcaactgtcattgagcaaagacttattgttagacattacggtgtcttgtagagacgctacgcccattcgtagcataaataagttttattaaattttaaccatcactaactaatgacacgtctattgtatcattttcaatggttatatggcaagatgacattggtcctattattaaaagaagtaattttctgaaaatacagtcattaaaatgctgctgggcgaaaaacaccataaatattataagaagctaaggctaataatcctaaaagcggttgaataagcgctattacaatcaagacaatataaactgttatgatatttagcgttacacgataaggataaggtggcatttggtcattaatctcactcaggaaatgataaagtaatcgataagacatggtccacaatatgctcagtacaataaaggtcaccaaaggttgggcgtggtcaggataatcaccaatccatgaagttacaaatgggataaatgactgaatcaataaccacacaccattaacccaaaagaccctgcggtcaatcacttcaattgatttaaataaattatgatgattataccaaacacctaataacaaggtaaacgatgatatgtaagcaatgtaagcttgccaatgttcaaaaagcgccgagatggtatagctatctggctttggcaattccaaaactaatatcgttataataatggcaacaatggcatctgtaaaagcttccaatcttcctttgttcatcactacttttcctcctttattgtgcgtagcggtcaacgatttcttgtaattctgctaaataagcctcgcgtaaaaaatcaggctccatcacagttaaatgttttccaaaagtgattaagtattgtaccatatagtccaattcttctctactaaaatgtcctacaatataatactgaccattttcttcgtggagttgcatatcacgataagcaccctttaaaaaatgctcttttccagcaccatcgatttcgcacttaaaagaaattgtcagataatcttggtaaaatgccataaaagacttcgctaactgcgcgcgattttgacggttttcttggttttctgccctctcacaagcaagtaaacaatccacacgataggttttccatttgtcttcatccaccaaataagcttcaaaaaaccaaatcccactacgataaaaaactttatagacttgtatcaactgctgtaagcgctccgtttgcttatagtcaatgtgtaaaatctgctcatctaccgtcgcttccaataattctcgcaaaaatgtgctagatgaaatgacaggaacatcgtaaaattccaaaacgtttaagatttttaaaacatattctcgctgtgctgtcgataaagagaccaaaagtttttcaaatatctgcggataacttttatcaaatggtgtcacagaaagtctgcgcaatgaatttaaggcataaaaaatcattgtcaaatcgtcttgggtgaaataaatcggtgtcagcaaggtctgactaaccagatgatagccaccgtttttaccagtttccgtataaaaagccagtcccatatcttctagtgcagccatgtcccgcaaagctgttcgttttgaaatctgaaactctgtcattaaatctttcaattgaaaaaatgggcgttctgacagaaaaataagttcgtggttaaggcgttctgattttttcatcttttctttccttatcggtgtcatattttgacaccatttcatgttatgcttagtatatcaaaaagaattggagaatacaaagatgaaaactttactaataaacgcacaccctgattaccaaaataacaacagttttagtgcgactttacaagaaaaattccttgataaatacgctgcccgattttcaaacgatgatctcacaattttaaatctttatgcgatagacatcccacgtattgaacaagacgaattattaggaatttggaaaaaacaagctgacaatcttccattgactgaagctgaattagctctagcaaaacaatcgcaagcattgttagaacagtttaaagaacaccaccgtatcgttattgtgtcacctttgcataatttcaatgtgacctcacgaatgaaagactatattgacaatatcttgattgctcgtgaaacattcaaatacactgaaaatggctctgttgggctaatgaccgatgattaccaagtacttttgcttcttgccagcggttctatttacactaatcaagaccgctatacaactttggattttgctcctaactacattcgtggcattttccaagaaatcatgggttttgacgctttctaccttgtcagagctcaaggaactgctgttcgttctaaggaagagatactagccgagacagatgccactttaaataaagcattctcagagttttatcattaacatacaaagaaagccactcaaaaaagagcggcttttatatatttcaaacttaaatcgaatcaccattccaaatggaatttttaacgatgacgtaatcaacacgtgttaaactgtgcaaatcacgtccaccagcgtaggaaatcgcactttgaaggtcttcttgcatttcaaccagagtatctttcaaatgccctttgactggcaataagattttctttccttcgacgtttttatgttcacctttttggtattcagaagctgaaccgtaatattctttatactgctcaccatctacttcgaccaattttcctgggctttccaagtgccctgcaaataatgaaccaatcataaccattgttgcaccaaagcggattgacttggcaatatcgccgtgcgtacgaattccaccgtcagcaataatcggcttacgagcagctttggcacaccaacgaagcgcagctaattgccacccacccgttccaaagccagtttttactttagtgatacagactttccctggaccaatcccaactttcgtagcatcagcgccagcattttccaactcacgaacagcctctggcgttccaacattaccagcaatgacaaaggttttaggcaattcttttttgatgtgttgaatcatgttaatcacactatcagaatgtccatgggcaatgtcaattgtgataaattcaggcgcatcatcttttaaacttgtgacgaaatcgtactcatagtctttaacacctactgaaatagacgcaattaatccttgttcgtgcatacgctcaacaaatggtttacgagcctcttcatcaaaacggtgcataatgtaaaaatacccattcttagccaaatcttctgcaatgttttcatcaataatggtctgcatattggcaggaataacaggcaatttaaaggtataatcgccaagtgtcacttgcgtgtcagcttccgaacgactactgatgatacatttgtttggaatcagttggatatcttcgtaatcaaagacaggcatttcgttatacatatcagtttctccatagtttctgctaccgcaactccaacctgtcaaaaatgtcttaactaaaaaagaaagtcactttttgatagtagagtttgcctaatagctagaaactctttcattaaaaaatgaccttcctataactctcctacgtctgaaaatagcagagcatcgctaggtaaaaacttacctttccattattattttacactaccgttcgttttatgtcaattattttattctgcgtttttgaaatgttcgtttttaacgtatgttttttatgtttaaagcgtgacaaaatgatttaagttttgtttcagttttctttcagttgaaattaagacaagttgtctatacttctttcgtatcaaaatttcaaaggagagttttatatgaactttattaagcgagcttggcttgcgacaaaagcaaagaaaggacgtacggcactactaattttagtaactagtgctattttaattttcgttttagctggattgaccattaaaaatgctgccgattcagctgtcgaatcagccaaaagtgaagctggcgcaacagtcaccttatctgttaatcgggaagcgatgatgaaagctttcaatcctgacagcgacagcagttctgataattctagtgacgatagttcagcaactacttctgttgaccttgcgacagccgagtctatcgctgaaaaagacggcgtagcttcttatctctttaccacaacaacgacagcaacagctggtgatgatatttctgctatttcgacatcatcttcatcttcttcagatgattcagattcaagcagcgatgattcatctgatagcaatcaaccctctggtcgtggcggtatggaaatgacatctggtgactttaccattacaggtgtcaacagcactgattacgtgagtgactttacatctggcacaagtgaaatcactgacggtgttggtatcacgtctgatactgcggataattctgcggtgatttcttcagatttagctgacgctaatgaccttagtgtcggagatacctttaccgtaacaacaaccgtggatgatactgaaacaagttatacattgactgtcgttggtatctatgagaattcatcaacagctactacagctcaaatgatgtctaatgcttcaaatcctcaaaacaatatctacaccaatctaacaacagcagatacaatgaaaggtgaaacagacacacttgattcagctgtttatactctctcaaatccagaagatatggacgatttcgttgacgaagtagaatctgaaatcgatactgattcttactctgtcacttcaagtgatgaaatctacgaacaaatgctttcaccacttaacaatatttcatcaatcgctcaaaacatcgttatcttggtagcaatcgctggcgctgttatcttgacacttattgttatccttagcattcgcgaacgtcgttatgaaattggtgttctgatgagcctcggtgaaaatcgcattaagattatcggtcaattctttatggaactcttcatggtaacggtggtatcacttattattgcttcatttgctggtaattttgtgggaaatgcgctcggtaatcagctcttgtcatcatcaacttctaccgaacaaacgacccaaacttcaggacaaaatggcggtggtcctggtcaagatactaattcttctgacagcaacaatagtgattctggtcaaaaatctggtgctcctggtggcggcggcggtcgtggcggcatgggtaatatggtatcaatggcaacctcttcaactcaagaaatcgatgaccttgatatcaaattaacaggaactgatgtcgcaaaacttggtggaattgcacttctgatttcatttgtttcaacaattcttgcaagtattggcattatccgcatgaaacctaaggatatcttatcatctaactagaaaggactaagaaatgactttacgaacacataatatcggttattggtacaccaacaatcctgacgattatctttttaaagacgttaatctaacctttgaaaaagggaaagtttactctattcttggtcagtcaggaagcggaaaaacaactttcctttctctactagctggcttagatagccccaaagctggtgaaatttatttggaagataatgatatcaataaatctggtttgaccaattatcgtaaaaactctgtttcaacgattttccaagcttataatttaatgacctacatgactgctcgtcaaaatgttcaaacggcgctagaaatctctaacaaacccgtggacaatgccaaaatcgaagaactttttgaactcgttggtattcccaaagaaatgattgacaagccagttcttcaactctctggtgggcaacaacagcgtgttgctatcgttcgcgctttagcaacagaacatgatttaattatcgctgacgaaccgacaggaaacttggacgaagaaacaacacaagacattgtcaatatcttcaaagatattgcacataagcaaaataaaaccgttattatcgtcactcacgaaacagctgtcgctcaagaaacagacgtcacgtttgaactcaagaaaaaacaatttacagaggtttaaaaataaaagaatgcactcaacttcattactgagtgcattttcattatcgtaaaacttatcaatctgacaaatcttgtccatttgcggcaatgactttcttgtaccagaagaaggaatctttgcggtagcgtttgaggctgcctacttcttcatctgtacggtcgacgtaaataaagccataacgtttacggataccttcgtgtgttgagatgaggtcgattgccgaccatggattgtaaccaagcatatcaacaccgtcagaaatagccaattggatttgtgcaatgtgttggcgaaggtattcgatacgatagttatcgtgaattttgccgtcttctgtcaaagtatcataagctccaagaccattttcagtgactaaaagtggcaaacggtaacggctgtacatttcacgaacagttgcacggaaaccaacagggtcaatttcccaaccaaattctgttttcacaagatttggattgtcaacgctcttcgcaaaacctgggaaagtttgatttgattgttggtcgccattagcgcctgcgacttcactaccgtcagaagcttcaacagtcgctgtattgtaatagttaaagccaataaaatcaggtttagctgctttcatgatagcacggtcctcatcagtaaccgttggcaaagcatcattttcttccaaatatgcccaagctaggttattatattcaccgaaaacataagcatctaaataaagccaattacgaagcgcattgaagttttgagcagcaataacatcttctggttttgatgacgctgggtaaaccaaagaaatatttggcgctggaccaattttagcatcaggaagcatttcatggcaaagttgcattgctttagcttgtgcaaccaattggtgatgattttgttggtaaatctctttagtgagattagttgttccttctggcacatgaagcgtaccgataactggaccaaccaatgttagcatattttgttcattgattgttagccaatatttaacacggtcaccgaagttttcaaacaagacacgcgcatattcagcgaaccaatcaacagaatcatgtgttgaccaagaaccacgttcatcaagcgccgctggcatatcaaagtggaacattgtgacgattggttcaatgtcatatttcaaacattcgtcaatcaaattattgtagaattcaattccttttggattaacctcgcctgttccatttggcaaaacacgtgtccaagaaatggagaagcgatatgatttgaagcccatttctgccattagggcaatatcttctttgtaatgatgataatggtcaactgaaactgacaaatcagctgttcctgcaggaatttctttcacgtcttggcatgacggacctttgccgtcctctaaagcagctccttcaacttgataagctgacgttgaagctccccacaaaaaatgttctggaaatggttttaaatttttgtgtaacataaaaatctcctcactaatgatttttcaataatattatatcgttaaaatcaaacaaaaactaatgatataaaacgcattccttgtactataatatgaattaatgttaagaatctcaataaaatatcaaaaaactgctcaacgcctctgccaaacagttttctttgttttaaattaatcccaatttttcaaaggcattataaagtccgtcttcctcaacgtcatcggttactatgtctgccatagcaaggatttctggaccgccatttcccattgagacaccaatttcacaatattctagcatgggaatatcaaccttggcatcaccaaaagcaatggtatcctttttatcagcttgcaagtgctccaaaagaacatcaattgcgtgtgctttggtaatatctttaacaccgaggtctccaaataacgccgtttcaccacgaccaccccatgttccagcttttaaacttggaaaagctttggctgaatccaaatggtcttggtaagaattaagaataaagctgaccttattcaaatcatcacgatacaattcgccgccataaatcaagccatgaagagcatcttctgcttccatatgttcaacttctgccgcagttttgcctttagaaagcgcatattgtcgcattactgggcgggcaacttctttgaaattttccgaagcaaaaagaccattatttgattctaagtaaaattccaacccacgttcgtgtagccagtcaacaatagctttggcatcctcttttgaaatcaactggtgcatgatcacctgaccgttatgttcaacataagaaccattgccaccaatcatgccatcaagaccaatttcccatagctcaggctgcatttctgcacgactacgtcccgtgcaaacaaagacataatgtccattttgacgcgcttgttgaattgctttgacagcagactctggcacgcgattatgataatccactaatgttccatcgacgtctaaaaaaataatcttactcatcgttttcctccaacctatctttgttatctattataaacagtttgttagcaagaagatagtatgatgttagcgttttctgatattatcctctgaatgttcaagacaatgcatgtgcaagttccctcatagcagcttacaaacagtttagttgtgcttttctgataaaatcgttatgattgataacatgaaaaacattaaagcattactggctcatcttccctaccgagctagtttttatgataacaatttaaagctcatttatagcaacaatcgctctgacggttcattttttccagaaaatgaaagcgagaaacttcctgaatggatttggcaaagcctgcatcaatctccagaaaaagtcctacatttgcaaacaccaacagatagttttgatgccatcttaacgcaaacttatcagctgattttagatacttctggtcaatcacttggtgtcataacttacattcaagacttaaaaccacttctgtctagttatctaaaagaaactggtcaagctatcgttgcttggtctgacaccacatcaggaccttctattggtaatgatttataggaatgataaaaagagccatatggctcttttttaatctcggtaaacgggttgtggtccaaaagattgggaaacaggcattatttcaatgcggttgatattgacatgagaaggttggcttgccacccaagaaacggtgttagcaatatcttctggtttaatagcatgtgcgccatcgtagagtttttcagcgcgttcattgtcgcctttaaaacgaacatttgaaaattctgttccctcacaaagacctggttcaatattggtaacccgaattttagtgcctgcaaggtccgcacgcaagttcaatgaaaattgtttcacgaaagcttttgaagccccgtaaacattagccccaggataaggaactgtaccagcagttgacccaagattgataatcataccagtattacgtttaaccatatctggcaaaatttggcgagttaaataagtcaaaccaacgatattcgtattaatcattgtcagccaatctgaaaaatctgcttcgtatgccttatccaagccaagtgctaagcctgcattgttaaccagaatgtcaatttctcgccactctttaggcaaagaagccaaagcttcatcaatagcttgtgtttgtgagacatccatttgaagagggtaaacattctgttcacctagtgctgcttgtaagctctgcaatttttccaaacggcgggcactagcaatgacacgataaccgtcagatactaatttttcagcgatagctttaccaaatccagcagaagctcccgtaactaaagcaatttttgacatatttcctcttttcttattaagacaagaaagccagtcggaaaaaccaactgagctttgttaatttttattaattgtcgttaccatcaatagcttgagcagctgtgatgatagctaatttgtaaatatcctcagcacttgaaccacgtgacaaatcattcacaggcttgttgagtccttgaaggattggaccaatagcttcaaacattcctaagcgttgagcaattttataaccaatatttcctgattgaaggtctgggaagataaagacatttgcttgtcctgcaatatcactatctggtgcttttacagccgctgtccctggaacaaatgccgcatcaaattgcaattcaccatccaaaagaatgtcaggacgtgtttctttagcaatcttagttgctgtttgtactttttcaacttgtggcgccttagcacttcctttcgttgaaaaactcaacattgcaatctttggttcaatgtcaaaaattttagccgtatccgcagtattcacagcaatttcagccaattcttgagcggtagggtcgatattaatcgcacagtcagcaaacacaagacgttgttctgttgtttcacgattcatcaagaacactcctgaagtgcgtgaaatgccaggtttcgttttaatgatttgaagcgctgggcgaaccgtatcagcggttgaatgaatggcaccagaaaccattccgtcagccaagccaagtttgacaagcatgacaccaaaataattgacatcttgcaacaaacgctcagcatcttctggtgttacttttcccttacgaatttcaagaaatgcttctttcatttcatcaaattgatcgtattctgctgggttgataatgacataattttgatcagcgaagccaaatttcgcaagcaaagctcgaacttctttagcgtctcctaaaataatcggctcaattaatccctcgaatttcaaacgagcggctgctcgaagcacgcgttcgtcatttccttcaggaaaaacaattttgaggtttttaccaataattttttcccgtaagctaccaaataaagatcgaattcccatatttttaaccttctatctaattttgttgtagttccatgataacgctatcaaaatcatctgtcaagtttgtggtctgaattatctcttcgtttgtgtatgggtttacaaagcgaaggtaatggcaatgcaaggcttgacgtgtaatgccataatccatgcttccgccatacatatcatctcccagcaatggaaagccaatatgcgaaaaatgcacacgaatctggtgggtacgtcccgtatggagacgaatatctaccaaagctacctcaccaaaacgcgccacaacttcatagctcgtgtgggcgtatttgccagacggatgcacacaacgtgtgatgatactatcatctgaacgagcaatcggtgcaataatctcacctttatctgctaattcacctttgccagaaaccaaagcataataccgtttttcaatggttttattttgcagttgcttatctaatctagcgtgtgcatagccatgtttggcaaacagcatcaatccgctcgtatccttatccaaacgtgtcacaatatgcacctgtttattgggataattttgctctagataataatgtttcacaaaattagcaatcgtattggaatgcaaaacacttggaatactagcatagccatgcggtttatttataatcaaaaaatgctcatcttcgtaagcaatattaaggtcatgtttgacaggaactaacgtctcatgttcttcttcgtcaggaatttcaatggtaacaacatcaccaacgttcaataaataaatggcattttgttcaacaccatttacccatatattcccgcctttgaacttaactttggctaataatccttttgaaacatcatgaccttttaaaaatgtttttacttttgtctgtcgatcagcaacaaaatcaaatctcacgactccaactctcctataaaggcatctgttacgcgttcccagaaacttgtatggaacggtgtcgccacaaaactaatttttttattgtcaatgcaatattcaattttagacacatttttgtaatgcatcgttttattatcgattgaaatcgtgtaaacgccttgacgtttaggaataatctcaattttatcttttttaggaacaatcactgaagaccctagcgtgcgatagacacgattattcaaactagaaatttccgccagctgcaaggcttccattgtcggatgcaaaatcgcaccacctaatgatttattataacctgtacttcctgttggtgtcgatacagaaagaccgtcaccacggaaacgttctagtttcactttatcaataacaacatccgcaaccatcgttttttcaatacgtttaatggctacttcattcaacgcacgcgctttaaccacacgcccatcgtccaaggtaatttttgccctcaaaataggataagaaaccttacgtcccttatcagcatgcaaattttcgattaatttttcaacttcaaaatcacgataatccgtatagaaaccaaggtgtcctgtatggattccgacaaagcgcactttatcaagatttttttcatacatgtgaaacgctgataacaacataccatcaccaccgatagaaatgacaatatcaggatctttcttagatagataaaatcgcttgtcctccttgaaggtcgcaaaaagttttgaagcaactcgcctgctttgatattttccgtttgccacgatagctactcgtgtcactttatctgtaatattcgtctgtgtcatcgctatttcctacaccatcacttaattttcgacttgcgggatcaaataaaagctgtgcttctctaatatcctcacgaatctttctcatttcttcatccaattcaagcgcaattttcgctgtcgtttcaaggcgcttcttgatttcatctggaaattcacccttgtacttataattcaatgaatgctcaattgtcgcccagaaattcatggctaatgttcgaatttgaatctcagccaagaccgtcttttgaccatctatcgtatctactggatactctacaataacatgataagaacgatagccacttgctttcatgttattgatataatcacgttcttgaacaattgtcatgtcgtgacggccacgcaaaagagctagaacttcatcaacgtcatctacgaattgaaccatgacacgaacacctgcaatatcttgcaaatcctgtgcaatattttcaggtttaattccccgaagttccattttttccttgatactttcaactgattttacacgaccagttacaaattcaatcggagaatggcgattttgcttacgaaactgcttacgaataccacgtaatttaatcttcaattccccaactgtctgtatgtaaggatctaaaaatttttcccagtccatcacatttccttcctaatggacctgtcacgaaagacatgaccaatccttgtcaaaaaattgacttttgtatagaattaatataataaactaattataccataaatctaatggtgaaaaaaaggaaatttatttatgacacaccttgaaattgagtacaaaaccttactcactaaagacgaatttaatcgtctcaataatcagttttcacacgtagcaccagtcacacagacaaactactacttcgactcagaaaactttgatatgaaggctaatcgtatgtcattacgtattagaaccttgcccaaccgtgcagaaataacactaaaaattccaaaagaagttggcaacttagaatataactataatttgagtgttgcagatgctaaagaaatcatcaaatctggagaatttccagatgttgattttctaaaacttatcgaagaaaacggggttaaactctcaagtcttaaaaactttggcagccttacaacaacacgccgtgaaaccatgactaaaattggtttaatggcacttgatagcaaccaatacgctggtattaaagactacgaacttgaattagaagttgaaaatgccgaacaaggcaagaaagattttgacaacttcttagccgaacacgctatcgatttcaagtacgctaaaagtaaagtcgctcgattcagcgcgaccctaaaacgaatttaaggcgctttttcatgagaaagtgctgaattatttcattttttttgatagaatataagtattaattttaaaggagtttatttatatcatggcagaacattacgccgacaaacaattcaagcttttttctctttcttctaacgtagagattgcacaaaagattgcggacacagttggtgtcccacttggaaaagtgtcaacacgtaagttttcagacggcgaaatcatgattaacatcgaagaaacagttcgtggagatgatatttacatcatccaatctactagctaccctgttaatgacaacctttgggaacttttgattatggttgatgcttgtaaacgtgctagtgcaagcacagttaacgtggttatcccttattttggttactcacgtcaagaccgtatcgctgcatcacgtgaaccaattactgcaaaacttgttgctaacatgttagttaaagctggcgtggatcgtctattgactcttgaccttcacgctgttcaagttcaaggattctttgatgttccagttgataacctctttactgttccactttttgctaaatactactgtgaattaggactaaaaggtgaagacgttgtcgttgttagccctaaaaactctggtatcaaacgtgctcgtagcttagcgcaataccttgattcaccaatcgcaatcatcgactatgcagaagatgattctcaccgcgaagaaggttatatcatcggtgaagttgctggtaaaaaagctatccttatcgatgacattttgaacacaggtaaaacatttgctgaagctgctaaaatcgtagaacgcgatggcgcaacagaaatctatgccgtagcaagtcacggtttgtttgctggcggtgctgccgaaagccttgatacagctcctattaaagaaattttagtaactgactctgtcgctactaaagaacgcttgccaaaaaatattaaatatctttcagcaagcaaattaattgctgacgcgattattcgtatccacgaaaaatcaccactcagcccattattctcatataacgctacaaaggactaactaatatatgatatatctcgataatgctgctactacccctctcacaccttctgttattgatgcaatgacagaaatcatggtcaacgattttggtaacccctcaagtattcatggcattggacgtcaagccaaccagcgcctacgctcgagccgccaaatgattgcctcagccttaaagactgacccacgccgcattatctttacatctggtgcaaccgaaagcaacaatactgctatcaaaggttacgcccttgctaatcaagctaaaggaaaacacctcatcactactgctatcgagcatcattctgtgcttcacaccatggaatacttggaaaaacgctttggttttgaagtgacctatctgaagcctgaaaatggtcatatttctgcgcaacaagttgctgacgctttacgtgatgatactattttggttagcatcatgtttgccaataacgaaactggtgatcttcttcctgttaaagaaattggagaacttcttcaagaccatcaagccgcattccatgttgatgccgttcaagccgtcggaaaaattgatgtctttcctgaagaaatcaaagctgattttctttcagcttctgctcataaattccatggaccaaaaggtgtcggtattctctactcaacaccacagcattttgataacttgcttcatggtggcgaacaagaagagaaacgccgtgctagtacggaaaatatgattggtattgccggtttagcccaagctttgtctgacgccattgctcataaagatgaaaattatcaacacgttcaagaacttcgtcaagcattccttgatggcatttctgatttggattattatatcaatggtagccaacataacatgcctcacgttcttaacatcggttttccaaatcaaaacaacggtattcttttaacgcaacttgatttagcaggttttgccgtttcaacaggttctgcttgtactgctggaacagtcgatccaagtcatgttttgtctagcatttatggtgacgattctccacgtttaacagaatctattcgcattagcttttcagagcttaatacaatcagcgaagtccaacaactcgctcaaaaattaatagaaattgtaggaaaataagatggcatttgaaaaagaaattactttagaaaactgtctttatagctatgctattagcgataacatcaaaaaatacacgcttcgtgataccacattttcacaaaatcgtatcggaaactacgaattaacacgcttgttggaaaaagtgcctaattctggtgatggtttcccattgaaaattacgattaacaaagatttgacaggttttaaactcagcattactgataaatctggtctgcgttttgtcaatatcttcaaatctgaggacaataaaatccttcaagaaaaattttatttcttaatggatagtcttgtggaacgtgatattttcacaaaaaaacgtgtttaataaccttttaaacactaaaaacgacttaatatctaacattttttgttagtttaagtcgtttttttagcttatttcgttaaatttgtttctgttttcacaaactttttgatacaatagtgttaacaagtaaaagggagatggtattgtgactactgagaaatctattcctaaagcaacagctaaacgactctcactttattatcgtatgttcaagcgattcaatacagataatgtcgaaaaagcgagttctaaacaaattgcagatgctatgggaattgattctgcaaccgtacgtcgagatttttcatatttcggcgaactagggcgtcgaggattcggctatgatgtcaaaaaattgatgaatttctttgctgacattttaaatgaccattcaacgacaaatgttcttcttgttggttgcggaaatattggacgagctttgcttcactatcgtttccacgatcgtaataaaatgcaaattgctatggcttttgatactgacgataatgaaatggtgggacatgaaacatcagatggcattccaatctatggtatctcatcactaaaaaaacacgcgcaagaagctggcattgaaacagctattttaactgttccaagttcaaaagctcaagaagttgcggatgtcttggttgatgctggtattcatggtattttgagcttctctcctgttcacctcaatgttccaaaaggtatcatcgttcaatacgttgatttaacaagtgagttgcaaaccttactatatttcatgaatcaatccaatcaaaataaataggctatcaagttagcttcaaaaaggtactttcgtttagaggaaagtatcttttttgttgcttactatttattttttagaatatattttatgaatgactttcttctgctgctttctcgttagcaattcaaagtgaacgacattacaaaacatctgtttcttctcggaagctgtaatattggtattttccgatgacgatatggtcaaggcagatgatgccaatatcttcacaagcgcgtttcattttttgggtaaattgcaggtcgttctcgctcggtactggggagcctgacggatgattatggacaataataacggatgttgccatatttttgcatgcataatagagaatttcacgtggttcagcaatcgaacggcgaacagaaccgataaaaatcgttcgttgttcaataattcgattttgcgtatccagataaatagccaccaagtgctcttgtttttggtcgctcaattctaacatcattttacgtgctaggcgttcgctgctcataatgcgttctttttggacatattcagccttgctaatacgctttgctagttcaatcattgctttgatttcaattgatttaacatagccaataccattgattttttgcaattcttgcagggataggtgttgaaaatcagctaggctatctagatttttcaagatttgattggcaacttccaaaactggggttgtttttgttcctgttcgtaataaaatagataatagttcctgattgctaaggtgctctgcccccaaatctctcaagcgttctcgtggcaacatagcatctgctttcatttcaattgcatacataataaaaagtacctccacttatttattcgtaagtcgaggtacttttttaatgatttttcttattttttaaacgtaatgcgcggtgctgatagtgtttataaagagcgctgtaacgtccgcggtaatcttttttccatggcttatctcgtccgcaaaaatgcaagaacaccgtatgttcaataacccaatttaaattccatttgccagaacttctactataataaagaacattatatcgcgcatcgtaattataaatctggtcaggaatttgcaaggtttgatgcccatataaggcattcaagatgtcttggtctggcaacaacaagagatgattattttgctcaatataatctaaaatgtcttgtcggtgcaccgactggcgaatggcatccaagttcatcaaaaggacaccagaattaaaatacccttctgcctcaaaattccctaaacgcagtttattaacgagttctgaaatattgccatctgacgtatggctagcagcggcatatagtttatcccctaaattcagcttatataagggaacaacatcattcaaacacaaaatatccgcatcaacatataaaatcttgtccaattcctttggcaaatattcatgagccaaaaggcgataataaatggtctcagggtaacgatctgttgttggagcatcttcaaatgcttcctcaccaatcacaacaggcgtataacggacacctagtttttgacagaattccgaaatgtcatcattcttttttaacaattgcttttgtaaaacataaacggctaggttatgattgctactattttgataaatcgaatatagcgtgaccataaattgcgaaacatagccatcatcgattgaaaagagtaaattgattgtatccatattatctcagttatctaagtttgcttgttggcgcttagcaacgttgtctttaatgatttgataaagacttgctgccaaaggtacagctactaacattccaaggataccccataaagcaccgccgattgtgattgccattaagacccacatacctggtaatccaattgaaccaccaacgacacgtggataaatgacattcccttcaaattgttgtaaaacaatcaagtaaactaaaaagagaaacgcttgtgaaacagattgtgtagcaattaagataaaaccaatggtcgctccgatataagcaccaataacaggaattagtgccgtaaatgcaaccaaaataccaattgttgccgcatagggaaaactaaacagaaacattcctgctgctgtcaagctccccaaaatcatcgcttctagcgtttgaccaacaaagaaaccgtgaaaacgttggtgcaaaatgtctaggacatagtgaactttttcggcgtatttgccaagataggtatcaatcaaaagattaaactgacgccccaattgttctttgcttgccaaaacataaattgaaaagactaagctaacaaagacatttaaaacagttgaagcaatcgtactaaccgacgtcaaaacccctgttaaaacggacagcacttgatttaaaatttgctgactataatctgaaagagttgaggtaatatcagatgaatttccaaaataatcaaacagttctttgatagccttattatcactcacttctttaataaaattagcaatgccagtcgtatcaatcttcagtaaggaattaatacttgaaatcaaatcaggcaggacaatcgaaaagagccagctaatcaataaaataaaggtcaagtatgccaaaatcatcgaaattgcacgtttggccttcaaaagcactctatttttgataacgcgcgtgtagagcatttcatataagctcatgacaatgttgacaatataggcaattccagcaccaattaaaaaggggaagcttgccttataaatcgttccgacaatcgacgcaccattactccaataagcttggatagcataacaaaggacaaaggcaagtacaacataatagacttgttttttctcgaatttcataacagctcctaattttcagttgctttcattatatcatatcaaaatttatcgaaaaaccgaaatatctacttcttttaacctgctttttgctattcttggctaacaatactatttatcataaatttgcccactaacggggtcaatgattttgattaaatcataagtgctatccgtgatactataattaaatatgcaacaatttgaaaaatgcaattcaggatgattatctaattctaaagcgctaaaaaagctcatgattgcgcctgcgtggctgactgctaaaatcgttgcatcatcgtctgcttgcgacactaaacgaaaaacagtatcactaacccgttttttcacctgcgtttcactttcaccgtcatattttaggtagaaatcgccatgtcccttttgattaggttcacgattcggatgtaaatactctggctttccttccattcgaccaaaattaaattctttcaaacctttgagccgtgtataatctgcacgtccgctcacaatttccaaagtatcagaacaacgttctgctgtcgaacaataaagcttatcaaaagtaatgtgatgagcatgaaaataatcacgcgctgcttgagcttgctgtttgccatttctcgtcaagggtgaatcgcaccagccttgaatcaacccaagttgattaaacaaggtttctccatgacgcattaagtagagtgtcttagtcattctcttccctttcaaaaatgtactctttttctgttggattatagattgattgcaccataatatccttaccatcataagtcattttgaaaatggcacagtttgccagacgtttcttaggaactggcggattcagcgtagcatgacggtaaaactgagttattgccgcaccatgactgacaaataagagctggtcttcatcactactttgctctaaaacctcacgaatagtcttagccattcgttcataaacttgaacattggattcgccaccataagccacaaaataatcacggtaacctgaaccatcttcacggtgtaaaggtggattgaggtattcttggtgtgcttcgtaagaaccaaaatccatttcttttagtcctttcaaacgaatataatctgtgcgccccgttgctaattcagcagtatcacaagcacgttcctgcgtcgaagaatagacacgtgtaaacgtaatgccctcttctttaaaatgttgtctagcagactttgcttgctcaattcccagttcagtcaagggagaatcacaagctccttggatacgtccttgaagattaaagcgcgtttgaccatgtcgcatcacataaaaagttttaatcatttttactccccttcaaatgaatatgtcttaaatgccttggttggtaaaatcagtttttgcaactctaactgttcttgatgatattggaactcacaaatagcacaatttgaaaagccaactccctctggaaattgaataccgagctgcagacaaacaccccacatcgttgctccatggctaaccattaaaatgttatcagcatgattatcatttgtcagcacttcaagaatgctgtccaaaccccgcttaccaactgttacaatgtcctcgccaccaaaaggcaccaacaaatcttcaaacgaattagcacctgctctaaattttggcaaaagaaattcaggctgtgcttcaaactcaccaaagttcatctctttgatgccttttaattgagtgacttgtgattgaccagacaccaatttagcagtatctgtcgctcgttcttgcgttgaagaataaacactatcaaaccaaatgctattttcattaaaataatctttggcaagaagagcttgctgaatacctaaatctgttagaggcgaatcgcaagctccctgcacccgcccttgtgtattaaataaggtctcgccatggcgcatcaaatacaattttgttgccatttatatcattttccttcctagcaaagaaactcagctgaaaaagcccaactgagtttattatcattaatcgtttaaaatattagcgccacgtgttgcaatcaaatctttataaaagaagaatgagtctttacgtgagcggtcaaagctaccgtttccttggtcgtcagcatcaacgtaaacaaaaccatagcgttttgacatttcagaagttgacgccgaaacaaggtctgtacaaccccaccaagtgtatcccatcaaatcaacaccgtcctcaatggcttcatacatttgtttgacgtgtgattggagataatcaatacggtattggtcgtgaatcgaaccgtcttcttctactgtatcaagagcacctagaccattttcaacaaccataagcggtacttggtaacggtcataaagattgttaagcgtgatacgaagtccgacaggatcgatttgccaaccccagtcagaagcttcaagatatggatttggttcgcttaggataagatttcctgctgtttggtcgcccgttttttgcttacgagcaattgaactcatataatatgagaatgacatgaagtcaacaggatatttttcaagaatttcaaggtcaccgtctgcgatttctaattcgatattattttctttaaagaaacgtttggcatatgctgggtattttccgcgaacttgaacatcagagaagaatagattttcatggtcttttttgatttcttccatgacgtcttctggattgcaggtcgcaggataggcttgcatacgcgctaacatacacccaatcttgaaatcaggattaatctcgtgaccgatttttgttgccaaacttgatgctacaaactgatgatgagctgcttgatacatatcttggaggttcaatttaccatcttcaaacaagagcccacctgataaataaccagtcataccaataatattaatttcattgaatgtcaaccaatatttgaccttatctttgtaacgattaaagaccgtttcagcataacgaacaaagaaatcaatcactttacgatttttccagccaccgtattccgttaccaagtggattggaaattcatagtgagataaagtaaccagtggctcgatgccgtatttattaagctcatcaaaaaccttatcataaaaagctaacccagcttcattcggtgtcgcatcatcaccatttggaaaaatacgtgaccatgcaatagaaagacgaaaagtcttgaagcccatttcggcataaagggcaatatcttctttataacgatgataaaaatcagacccccaacgttttggataaagcccttctttatcattcaaagctgcatccaatttagcacgagtcattggtgaattaaattcacttcccattgatttgcgttcttctggagcaacggcacgcgctgtatccgatgtcgctggaccacgtccgtcaacattccaagcgccttcaaattgattggcagctgttgcaccgccccacaaaaatccttctggaaattgttttgtcatatatagtcacctcatacattgatttactcttgtattatacccagaaatgtaggcgttttctattactatgttcttgaaatatgatactataccactattattacgataatttaccaaataaatgcatttttagcctatgataactgaatttattgggtaaataggaagtctttttcttttgctcaactttttgatgattatgttctgacaaagatttgtaaaatcccttaacctaaccaagccttttctatcctttattgatatagacttttcagatgacaatttgacaaacggcgtttctctctatataataaataagttgaaattattctattttttctgaaaatacgaaaaatagataaagactagtactcatttagtggttaatagttaaaaaattggttttatcttttaaccagtgatttaagtgctatgattattaggagtttttacttatgtatgattttctatcgtctttggacagccttgtctggggaccgccacttcttgttcttcttgtcggaacggggatttacctttctactcgtttaggtctgttgcaggttttccgacttccaaaagccttgaaactcatcttttcagctgaggctaaaggtcaaggagacatttcaagctttgcggctcttgcaacagctctcgcagcaaccgtcggaacgggaaatatcgtcggagtcgcaactgccattaagttaggtggacctggggcgttattttggatgtggatggctgctttcttcggtatggcaaccaaatatgccgaaggtgttcttgccattaaataccgtaccagagatgccaacggagacatcgcaggcggaccaatgcactacatcgtaaacggaatgggcaaacattggaaaccactcgctattgctttttctatctttggtgttatggtggcactttttggttctgggacatttacacaagttaattctattacagattctcttaacaataccgttggttggtcggctaaagtaatcagtcttgttttagctgtgctagttagtgttatcatctttggtggtattcaatctatctctaaggtagctgaaaaaattgttcctttcatggcaattatttacatcttagcaacccttacaatcctagccttccattttgactatattattccaggtttaggattagttttacattcagcatttactggaaaagctgctacgggtggttttgctggtgcaacagttgtcacagctattcaagcagggattgcacgtggtatcttctctaatgaatctggacttggttctgcacctatcgccgctgcggctgctaaaacggaagaacctgttgaacaagggcttgtctctatgacaggaacatttattgataccattattatttgtactttaacaggtctttctattatcgttactggtggctggtcaagtaatttgaatggggcaacgctcacgcaatcagcattttcatctgtctttggaaacttcggtgtttatgccttaactattagcttgattttatttgccttcacaacgattcttggttggtgctactatggggaacgttgttttgagttcttatttggtgtcaaagctatcccggtttatcgtattgtctttattgctatggttgctttgggtggctacatcagcttagaaacaatttgggttattgctgatattgttaacgggcttatggcaattccaaacttgattgccttactagcactttcaccaattattattaaagaaacaaaacattattttgataatcattgattaaaaatctggaatgaattccagatttttaatttgctatcgtcgctaaatggttgattttatcatattttctttgtgacaagcttaaactaatggtataatagagagtaatatttattttaacgattattgattttatgatataactatcgttttcaaaggagctattgcttatgccaacaccagctgagaatcttcggttagctaaacgtggtccaatagtaagcatcattgcctatcttacgatttctgccgccaagctaattgcaggttacacgcttaattcatcatcacttattgccgatggttttaacaacttgtctgatattttgggaaatgtcgctctgctaatcgggcttcatttagccagtaagccagcggatgccgaacaccgttttgggcattggaaaattgaagatttagcgagtttgattacatcctttatcatgtttatcgttggtttccaagtgctatctcaaacaattcagaaaatcatttctggaagccgcacagccattgacccagagggagctatcgtcggtgtcatttcagctattattatgtatggtgtttatgttcacaataaacgcctatcgcaaaaagtgaaatcgagtgctctggttgctgctgcaaaggataatctttctgatgcggtcacttctattggtacgtctgttgctattgtggctgcttctttcaatcttgttatcattgatagacttgctgctattgttattacctattttatcttgaaaacagcttatgacatttttatggaaagcgcctttagtttatcagacggttttgatgaaaaagagcttaaaaaatacaaggaagccattttaaaaattcctaaagtaactgctgttaaatctcaacgtgggcgttcatatggaagcaatatttaccttgatattgtcgtcgaaatgaatccagacctttctgtttatgaaagtcatgagattaccgaacagattgaaacattgctcagtcaggaattttcggtgtacgataccgacgttcacgttgaacctgctgctattcccgaagatgaaatttgggaaaatgtttataaaaaactttataaagacgaaaaaatcattctttctaaaattccagactacgaagacctactagctgataattttacacttattgatgatgacggaacaacttattcaaaagaggaaatgatttcccgtaaaaaacattgcatgagcaattttgatgattttcaaatgacatcaatcagccaaaaaacaaaactcatcacttacacgcttggtcataaatcacacactagcatttggcgtcgtaaggaagaatggcaccttatttttcaccagattaccccaattagcgataactccaatattgaagcaaaagactaaatatgctcttctagtcttttgactaaacaagaaatctatcaaaatcataataaacaaaaactctgaggctaacctcagagttttactattttcgtttagtttttaacgtcgtctgttgcgacatcttcaccaaaccatttgtttgaaatttcttggaatgtaccatcttgatacaatttcttgaaagcttgattgattttcttaacgagtgttttatcggctttacgagcaccaacggcaaagtcttcaccgtcaaattcacttgaaatgatattgtagttatcaagttcgccttcttgttcaaggtagtaattagcataaactttgtcaatcaacaaaccgtcaatacggtcatttttcaaatcgataagtgcttgtgtgaaggtttcgtattgtgtcgcatcgccaccagaaacaatgtccttcaacacttctggatttgatgtgaacgcatcgtaaccagatgaccctgactgtgcaccaagcactttatctttcatgtcagcaaagcttgtaatgcctgatgattttttagttaccaagacttgctcgttaaccatgtatgggtttgtgaagaggactttttctgcacgctcatctgtgattgaataaccgttccaaatcaaatcaatggttccgttattcaactcggtttctttcatatcccagttaattgattgccatttgacggtaataccatattctttaaagacggcatttgccaaatcaatatcaaaaccgacattgcttccatcctcatcctcgtaccccatgggaacgaatgtattatcaaaaccgatagtaatttcaccgtttttaacataagtgtcccattggtcagtgctagtagcttttttagatgatgaagaactacaagctgccaaagttagtgttgatacaagcgccaaagcgcccataagaacttttttgaatttcataaactcacctagtaagactttctttattttggattaatttttaaaatatgatctgaaatgctttctgcaaattgtaaatcgtgggtaacaacgatttgagtcatgccagcttcgcgattttgtaaaatcaacttttcaacttcttgacgcaattctgggtcaagtgctgatgttggctcatcataaccaataatttgtgggtcaatcatcatggcacgcgccaaagccacacgttgtttttgaccacctgacaacgaatacggataagcgtcagcgtgttcaccaagaccaaggcgttgaagcaaggtaaccgctttttctttagcggcttcttttgtcatgcccattgtttttacaggtgataaggtcaaattatctaaaacagataaatgagggaaaagctgaaaatcttggaaaacaaaaccaagtaaattaagcgtctctaaatggtcgatagggacgacttcgccattgtaaatgatttccccagaatcaattttttcaagtccagcaagcatacgtagcagggttgtctttccgccacctgaaggaccaacgagagataaaattttgccatcttcaatcgtcaaattaaaatgatcaaaaatcttcttttgaccaaattgtttggaaatattttttaattctaacatctggtcacctcttatttatagtaattaaattttttctcagtttgttttgaaatcagtgtcaccacaccaatcatcaataggtaaattgctccagcaacaaacatcggtgctaatgtggcatcacgattggctgcggttttacttgcaagcaacaaatcgcccacaccaagaacgtaaaccaatgatgaatctttaacaagattaataatttcattgaaaacacttggtaaaacaatcttgaacacttgcggtaagataatataatgaatcgtttggagttgatttagttttaaaaccttagctgcttcgtactgccctttaggaatggctgcaatacctccacggaaaatttctgcaaaataagctgcgtaattcaacgtgaacgctaaaatagctgctggcaagcgatccattacaacaccaacactcggcaacacgtagtagaagaaaattaattgtaataacaatggtgttccacgcataatccaaacatataacgtcaacaaccattgtaagggtttgaatttaatctgcatcaaaaaagccaagacagcaccaaacggtatcgacaaaacaataacaatacagaaaacttgcaaagttaccttagcgccatctaacaagcttggcagaacttgtaaaatatatgacatgtgatctcctaaatagaatttgcttctattataccaaaatttcagacggtttgaatatatctgagaatatttttacataaaaagtataaaaataacagacatttgctgactagattctgcttaaaaatttttccaagaatcgtcatcaaactaaaaaactagacatctcgtctagctttcaatcattacaatttttttacaaactctgattttaatttcattgcgccaaaaccatcaattttacaatcaatgttgtggtcaccttcaacaagacgaatgtttttcacacgagtaccttgtttaaggtcttttggtgcaccttttacttttagatttttcacgatagtaacgctatctccgtcagcaagacgtgtaccgttgctatcaagaacaaccaagccttcttcttcaactgaatcgcttggattccattcataagcgcactctgggcaaactagtaataaaccatcttcgtaaacatactcagagttacattgtggacaatttggtaaagacatcatttctccttatcaaaaatagctataacttttatttccgacttcaaaaagttacattacccattttaccctagaaatcgctatttgacaagagattattcaacagtaaccgactttgcgaggttagaaatcgatataaaaaggaggcaaaatgcctccaaacaaaaatttatcctctaaaatcgtcgttatagattttcgatgctatcaacaatctctgaaatcaagtcttggtctgttaaacctgtcacatcagcaactacttctggtaatggttttgtcgccaaaagttcttgcaattgaacactttgttcatcgtttgaatcgttgtaattaaaaacaaaagcaattgtcttaaggagattttgataagataactgacgttcttttaattcacgaattggacgaataaagcgttcatcataaccaagtttacgaatcggtgttctggctactctattgacatcatcaacgataaaaggattttcaaaccgactgatgataattttatgataatcaatcaatgcctgctcgtcaaagttccacttagcaatgagaagactgcgaatctcaccaagaacagcttcaacttgagccttgacacgatcatcttttagagcttctaagattgtcttagcgccataaaatgcacctgtataagctgacgttgcatgacctgaattaactgagaaaagttttcgttcgataaatggttccaagtctttttcgtaatgaactccagttagtttaaaggttggatttttcatgcgacttgtttcaactacccattcattgaaaggttctacaacaacaaaaagaggatcttcatgagtttgtgctggtacgatacgatctactgctgcatttggaaaaccaacgtactgttcagcaaatgccaaactgtctgctgataaatatttcttcacttcttggtacaaatattgcgaaccaccaatcatattttcacaagctagaacgtcaatcggtgtgttgttcccagcagctttgcgagcttcaattccttttgcgattaactcagcaataaacggcagaatattaggaccgattgcggtcgtgataatatccgcactggcaatagccttgataacctcatcaggatttttagcattattgacaccgcttacatttttgacaacgatatgcggttgtccttcctcggcgacttcgatttcataggaatgccgtttgttaagctcgtcaatcacgcgttcgttaacatcaacaaaggtaatggcaacattattctttgaaagaatatcaccaataaaaccacgtccgatatttcctgcaccaaaatgtactgcatttttcatttttttatccctctctgtctattccacattatttaataatcgaataatctcgtcttttgattgcgcatctgccaatttgacaacattatcaacatcagcacagaaaattgagattttttgaatcatttccaaatgttcgttcccaattcctgcaattccaaacagaaccgttgcaatctgcggattatcttcagtcccaaaattcacaccatctggcacttgaacaacggtaatgcctgatttcaagactttctctttagcttcgtctgttccatgaggaatagcgataaaattccccatataaacagaaaggtcattgtcacgttgaatcattgcttcaatgtaatcttcctcgacataaccaccttgaaacaaaagtctgccacaataacgaatggcttcttctttggtgtcaaatgattcatttaacttgattaaatctttttgaaaatccatgtctaattctccaatttctttattttttccgtaaaaatttgattgagtagttgatagataatatccttattacccgttttgtaaatttctgtgtacaaatgattttcgataatagattgactaatagccgtcattaaatctctaacctcatcgctctcgttgagacgagttagcatgacgagcacccgtgaaatttcttcttcttggtgattcatggacatggcttgcacaggattttccaaatcaaaaataacaaaacaacttttcgtaaccttacttgaataagtgtgaagcaaggcaagattggtttctggaatagccattggacttgtcttgaaacgttgcaataatttttgagataagtaattcttatccgtaatgccctcgatgttatcaatcaatgtcggcacagtttcaacaaatgattttggattatcgatatgctgataggcaaaacgactgagaagcatttgactggcaagcaaatatttttgaaaatcgtactgcggtgtccgaatgatttgttcacgaactctcacttctcgatgtgcctgcacattttgaaggtattcttgtaacgttaataattcttttgcatctggataaattgaaatcatcttgatgtcatcatcgcgtaaaaccttggttgataaaacgctgtcgtagtattccttgtccttagcatcatactgagaacttgctttgacttgaatcgtttcaacaaaaggcgcaatggtctttatccttgtcactaataattccgtagccaatgggcgttcatcagttaacaacaacagcgaaatagggtaaatatctgggctacgacgtaaactagaagcaaaatgcaaagtgattaactcgtactctcgctcactctgtaggtaagctggaaaaatttctttaactaataagctcactactcgatgaaggtattcgttgctatgaagcgtctggtgagcaattgaagtgctatttgattcctcaaaaatcagcggaacagctaaatttaaacgaatatggttaaatagaaatttaaacaaaacctgatctttagcaaaattgattttagtataacgagcaactttatcgatgagatttgaaacgttatagaagaattcactgtcaaaattttcgttaaatagaggtgtttcttgacgtttgacagctaattcatccaccatctcagcataataaagaatttcttttaagctataaaattgcccactcatgcgtgaaaaatcagcaaaaactttctgcgagaattcaagtgatactttcgtaacaggtgttgacctcaactcaacttgcccccaatttgtcaaagctagtaaaataatgaaaaattgagtcaacttcgcatcaaattcaggaagttctttttgataacgttgaaaaacttcagtcgcttgtttcaattgttcagaagaaacaatggtaaagtgattgtagtcatgtttccaaaaatttggcagactgatattattcgttaacaatattgccaaaactctccgcttattgtgagttggactactcaaaaaatagcctttttttctctctaagattaaatcaaaatcttttaggcgtttttcaatatccgcaatatcttggataatcgtgacattgctaaccgcaaattgttcttgtaaatcatcgtttgtgacttcttcatcactaatcaaaagctgataagtaatcaaattaagacgttcattgcgtgtataggcaacttgcgttgtaaagtcagaaagattttccaaatttcccaataattgatacttgttctcttctttaacaatgtcaacatctagtgtcgctagactatctgttaagtcagcaattgtacgataaaccgtacgttttgacacctttaaaatatctgaaatattatcaattgaaagctttccaaattctaagaaagctttcaacaactgttcttctcgttttgttaatagcataatgtactaaagactactttcatcattatttatacattcgagcaaccattttgtcgtattcaggagttgttaccaaactatctactatcaaaagttgtgcatttggcgcatatttttgtacttctatttgattcgcaatcgttgatacgataagaatattcttcgcattgaattttccgagttggtcatttgcttcttttgcaactggaataccgattgatttatttttaaagattgcttttaaggttgcttcacccattgttactgagcctcttgctttgccgtaagcaaagataacttcgtcaatttgattaaggtcaatttcattactttcagtattggcagcgtcagcagcttcttgattaacaggttgaacaccagcagattcgccacttagcgcagaaacaatttcatcatattttggagtagctaagaaattatcaacactcacatgaactgcacttggtgttttttgcgctgcacgttcagctaattcttcttgagtgacaattaaagtatttggagtatcagttagatttgaaattgctttgttagatactggaatatcaagtccagcttttttaactttgtcacgtaagattgaagctcccatagccgaacttcccataccagcgtcacaagcaaagataatttgttgaacttcttctgaagtgacagctttaacatcacctgatgttgaagtttcttgaccttttgattcagcttttgcagcttgtgtagcagcttgagcagattcaagagaatcaccttctgatttatctgttctaaggataatggcagctacaaggaatgacgcaatcgttgccactaagacacctgcaagaactggaaggtaaccaccacgaggtgtcattgccaagatagcgatgatagaccctggagaagctgctgccgataaacctgctccaagaagttggaaagtaaatgttcctgtcacaccaccagcaattgctgcaaagaacaacattggtttcatcatgacgtatgggaagtaaatttcatgaatcccacccaagaaatgaatgataattgctccaggtgctgaagattttgctgaacctttaccaaagatagaataagcaagcaagataccaagacctggacctgggtttgtttctagcaagaacaaaatagattttccagtttcggctacttgttcagttcccaaaggtgtgaaaataccgtggttaagtgcattgttaaggaaaagcactttcgcaggttcgataaggatattagcgattggcaacaatttagcatcgatgatagcctgaactccaacaccaatagcatcagtcaaactagaaaccactggtccgacagctaagaatgccaagatgataagaataaatccgataattccagctgaaaaattattaaccagcatttcaaaaccaggacgaattttttcttggaatctttcatcaaatttcttaatgcaccaagctcctaacggtcccattaccatggcaccaataaacattgttactgatgaaccagcaatggcaccaaatgtcgctatggcaccaacgacagcaccacgttgtccataaacgttataaccagccgtgtatccaatcagcaaaggtaacaaatacgttaagattggcgataccatgacattcagtgtaggatttggaatccaccctgtatcaatgaacaaagtcgccataatcccccaagctataaatgctccgatattgggcataaccatgttggaaagtgcagtccctaacttttgaactctcactttcaatgaacttttattttccatcagagattcctcctttattcttgagtccattataatctttgatgtaagcgttttacactcaagctttgtcacaaaatttgtgacaaatggttagatacttgatatcctgtacaaaaataaaaagcactcgtataaacgagtgacgatattttccaaatttcacctgtaaaatggacacactaaaacctactcctgaaatcatttaggaatgttatttagaattacgtgatggtaaaacgacttgcaagtttttgttgtagtgaatgaattgtcagaattcttgttaaaaaatttttcatcacaaaatggtaataacttttagaaattatatctaaatatattgtaaccgttttcttgtggagttacaaaactcaaccatgattctccacccttttaagcaaaatttttcttagttgtatggtaatttaaaaacaactttaaacttttttcaaaccaatcagtatttttgcaaataaaaaaactaccaaacatatgttcggtagtcatattttctataaatcttattattcaacagtaaccgcttttgccaagttacgtggtttatcaacgtcaagaccacgttgtagagaagcaaagtaagcaatgagttgtgttggaattaccattgaaatgcttgttaaatatggatgaacttggttaacaacaatatcatctcctggtttagccaattcttcttcaacgactgtcaatacatttgcaccacgcgcagaaacctcttgaatattaccacgtgtgtgactagcaatcgcttcgcttgatgaaatcaaaccaagaactggtgtaccatcttcaatcaatgaaattgtaccgtgtttcaattctcctgcagcaaatccttcacattgaatgtaagaaatttcttttaatttcaaacttgcttccatcgcaacatagtaatcattgccacgaccaatatagaaagcattgcgagttgttttaagcagtgattccactttttcagcaatcacatctttttctgacaacgttgcttcgatagattgtgcaacgatagatagttcatgtaccaagtcaaactcaagcgcttcttttttgccgtttgcttcaccgacagccttagccaaaaaggctaaagcagcaatttgtgctgtgtaagctttagttgatgcaacggcaatttcaggaccagcgtgtaaaagcattgtataagttgcttcacgtgataacgttgagccaggaacattagtaactgtcaaacttggaatacccatttgattggcttttaccaaaacttgacgactgtcagccgtttcacctgattggctaagcaagataaacattggtttcttgctcaaaagtggcatattgtagccccattctgaagcaattccaagttcaactggcgtgtctgtcaatttttcaagcattgcttttgatgcaaaaccagcattataagaagttcctgctgccaagatataaatacggtcagcctcttgtactgtcttaacaatatcaggatcaacaaccatatttccttcgctgtctgagtatgtattaatcaatttacgcataacagttggttgttcgtcgatttctttcaacatatagtaagggtaagttcctttaccaatatctgacaaatcaagctcagctgtgtaagattcgcgttcaatttcattgccttcgtaatcagtaactgtcgcagaatctttagtcaagacaaccaattctttatcatgaatttccataaattcacttgtttcacgaatcattgccatcgcatctgaacataccatgttgtaaccatcacctaaaccaatcaaaagtggtgatttatttttagcaacataaatcgtatctgcatcttctgaatcaacaagagcaaaagcgtatgaaccttcgatgatagccaaagctttcttgaaagcttcaagaactgataaaccttctgaaacgaattgtccaactaaatgaacagcaatttctgtatctgtttcacctttcaaatgatgttctgaaagatatgtttctttaatttgcaaatagttttcaatgacaccattgtgaaccaagacaaaacgtcctgtttctgatgtatgtgggtgagcatttgtctctgttgcttgaccatgagttgcccaacgtgtgtgaccaattcctgtgtatcctgccacatcaataccgattttagcacgaagatctgaaatacgtccaacagatttaatcaaacgtccttgatctgtaccattagtcacgtaaattccagcagaatcataaccacgatattcgagcttttcaagaccttgcatcaaaatgtctgttgcatttttatttcctacaacaccaacaataccacacataattttcacctttagcaagactttacttgctaattctttcttattttttaaattggtatagtctaatgaagacttctaaaacctaacaacatcagtatataactttacttttatattgtcaacaattaaattggtatagttttatatataccgattatcgattggtatatctcataaaaaaacagagcagctactgctactctgttgtgatgaagccaaatttacttagcggtaatagtttaaacgtgacgacaccacgtatctgactttctttaatcagaccaaatgtacgactatcatttgtattctgacggtcatcgtttaataccagataacttccctttggcacctcgctatatttatcattcgtgatagtattaacagaaaaatcagatgtaaaggcttgttgattatccgatgtcgatagatattcagacttaatttggctaatgtatggctcttcttgaacttcgttgtcaatatacaggatatcgtccataactgtcgcactttcaccagcagtcgcaataacacgactgatataaaaagtaccatcaacttcataaacaataaaatccttgtattgaggagtccgattacgattgacaactacaacatccccattcgacaaatacgaattagccgcatcttcatgaactttaaatgttgaaaaaacaaaaatcctcaacaagaatatcgccaaaatagctatcaaagctataataatatttcgaataaaatcgcgctttaccataatttctcctattctttgttctattatatcatttttcattgtataaaaaaagtaggtcatttaaccccaaaatcaagaaaaagccgctaacacgtaaacataacagcctatatagagtaagtgaaataatttagaataaagaaaaatttttagattagattggaaagatatggatatttactttcaaaaaacaaacagacttcaatacaaagaaatattttgcgccccacaaacaaaatgaaagataaagttgtgaacacgattaatgaattaccactctagtttgccccaaaaatgccccacaacataaaaaaagccctatcacacaggctacaaagattgatatgataggctttttgttatttaggttattttacagtgcggatacgcattgtgtttgtaccacctgaaccaactggaacaccagcgacgataacgatgttatcacctgattgaaccaatcctgattcaagggcagctttttcagcaacttcaaacatgtcatcagttgatgcaggtttttcagttacaactggaataacaccccagttaatcataagtgatttttgagttttttcgtcaaatgttacagccaagatgtcagcatctggacggtatttagagataaggcgagcagtgttaccagattcagtaagagctacgacaagtttaatatccattgagcttgttgcatctttaactgctgaagccacaacttctgttttagaagtacgagcgaatgatgatgaatcaagacgtccgtattcgttaagaagagtttgagcgtttttatcaattgtagccattgcacgaacagcttcaactgggtatttaccatttgcagattcacctgaaagcatagttgcatcagtaccatcgataacagcgttgaatacgtcagatacttcagaacgagtagcacgtggtttgtcagtcattgattcaagcatgttagttgctgtgataactgctttaccagctgcattaactttagtgataatcattttttggtaaactggaaccatttcgaatggtacttcgatacccatatcaccacgagcaatcatgataccgtcagcagcttcgatgatttcatcaatgttgtcaataccttgttggttttcgattttagcgaacaaacgaacgtgtccgttaccagtttcttcacagatagcacgaacttcgttaacgtcttttgcagtacgtacgaatgagatagcgataaagttaagaccttgttcaagaccgaaacggatatcagcgttgtcacgatcagcaagagctgggaatgggattttagtgtaaggaatgtttacacctttttgtttagcgatgataccatcgttttcaacttcaacttcgaattcacgagttgcatcatctttagcaataacacgaagaccaagtttaccatcatcaacaagaacttgtttaccaacttcaacatcatcgtagatgtcaagagcgccagcaacgttcaatgcgataacttcacgagttgatttgataccttgtttagtagcaacacggattttttcaccagttttgtatgaatattctttagcgtcaccttcaaaaagttcagtacggatttctggacctttagtgtcaagaaggaaaccaactttttgaccagcaatttcttctgcacgacgtacagttgccatacgttcaccttgttctgcgtggtcaccgtgtgagaagttgaaacggaagacgtttgctccttctttaatcaattcagcgattttttgagctgatgcttcaacatcaaggctttcgccccaatatccatcttcaccgaattttttaccaccgcggagttctaccgcaggaccaagtgttgcaacgatttttacgcgtttattcatgataatatgaaactccctttatttttcgtcgatttaacgacttttaataacaataataatttttaatctataaatacaatactataagtgagcaatgtcacggtttaatttagcaaagtcaaggcgtgctttgtgaggcatgttaacaataatgcttccatcttctgccaatgagaacaatgcaccttcttcttttgttccaaggattgggctttctaccaattcttcgttgtggataccaacagcaagtccaccacgtccttcaagaagaagttcaacggcgtgtgcacccatccaagaagcaagaacacgatcacgaggtgatggagcaccaccacgaaggatgtgaccaaggtttgtagcacgaaggtcgctagtatctccagcttctttcatcaattcagcaaatttttcggcatgcataacaccttcagcaagaacgattaggtgacgttctttacctttgttttcataaccatctttaacttttgcaacaacgtctttgatgtcgtattcttcttcagggatgatgatttggtcagcacctgcagcaataccagaccaaagagcgatatcaccagcgttacgtcccattacttcgacaacgaaagtacgtttgtgactgaatgatgtatcacggattttatcaagagcttccatagctgtgttaacagctgtatcaaacccaatagtataatctgtaccagcgatatcgttatcgattgtacctggaataccgacagctgggaaaccatgttcagtcaagcgcatagcaccatgataagaaccatcaccaccgataacaacgacaccttcaataccgtgttttttaagttgttcgatacctgctaattgtccttcaagagttgcaaactcaggataacgagcagattgaaggaatgtaccaccatgtgacaaagtatttgacacactttgagcatccaatgggaagatatcgccttcaaccataccagcatagccacggttgattccgaaaacttccattccttctttaattgctttacgaacaactgcacgaacagcagcattcataccaggagcgtcgccgccactagttaaaacagcaatacgtttcattttgctaatactccttttattaatctaacgttcttattatagcacattactttgtaaaaagcttcactttatttgatttttacttaatttttattgataaatcgttttcaaagtataacttgatagcgcttcaataagctcagttgtcctttgaaccaaatgtctttgactttgcaatgtttgcttactatcttgatagtgtaaaatcactggaatgtttcctggatattgtgataatatctcagaaatttcattatcgtggagatgatttggaagtaagagccataatcgttcactacttgcttcttgaatatgatttaaaatcatctgcaagcggttgtttcgattctgaatttttccagtaaggtaataaaatcttccttcttgaagctcatctttgaaacgcgcaaaggtttctgggaacaaggtaacatcgaattttttctgagtatctgtaacactcaaaaatgccatttgctcacctttcgtttttgtcctgatgacacgaatctgattaagttctaccaaaatagttgcttcggtattttcttgcaaatctgctagcgctgtaaaatcttttgtggattgccttgcgatttctaaaagcggatgtgggctaattcctacgcctaacaaactctgctctaagcggtatttttcagcatttggataatcttctgtctcaatccaactataagacgtatccgcaaatagactcccgagctcattgacaaagataaggagggggtcaaggttttcaatgatttttcgacgatttttatcaaattggtcaaaagcaccaacttctacaagaggtgtaatcatctctctcttttgataattctctggcaatcgtgttaagaaatcttcgacactgctaaatggacgattttcgataatccagtagcataaatcgcgtggaacacctcttagattttttaagccaaggtaaatctgtccatctgaaattttatcgctgtaaggaacggtattgatatcgattttcttaactttaaattgtgaatccagagcgtctgtaatataatcagcgctagaataattcaacataacgtcgtaaaaaacagcaggataatgcgctttaaaataagccagttggaaagccaaagctgaataagcaaaagcgtggcttctattaaaaccatacccagcaaattttgccatacgactaaataaatccttcgccgtttcaagtggacgtcctaatcgttgcgctccttctaagaaatcactttccattttttgcatgtcatcagcctttttcttagacatggcacgccgtaacaaatccgcttttccgagagtgaagccagcataaatttgagcgatttgcataacctgttcttggtaaagcatgatgccataagttggctctaaaatcggtgctaccaatgggtcaatcaaatccacttcttcttgcccaaaacgacgtttgatgaagttttcagtgtaatcactagcacctggtcggtttaaactagtcgttgcaacaatatcttcaaattgacgtggttgaatacgtttcaaaagattaattgctccagcttgttcaaactggaagattcccttggtcttgccagccgcaaataattctaatgtctttttatcctctaaatctattgatttaatatcaatagtgaccccataatctttagcaactttttcttgcatacgttggacaaatgtcaaattacgtaagccaagaaagtccattttcaaaagaccatttgcctcaactgcttgagcatcatactgcgtaatcatcatgtcttcgccagcttttaacggaatatgttctgttaaattatcatcgctcataacaacccctgccgcgtggatagaggtctgacgtggattgccttcaatacgttttgcaatcgcaaatgctttttgatattcaattttagaattaataatctgacggaaagaaagatttttctcgtaaaccgacgttaaactatctctgaaactgatttttttcgtgatatttgtcaattcatgctcaggagccccaaaccgtttaaaaacatcacgaatggcttgttttgctccaaaggttgaaaacgtcacaatctgcgctgaatgcaaactcccgtaacgattacgcacataatgaagaaactcgctacgatacacatctggcaggtcaatatcaatatctggcatgctgtaacgttcttcattcaagaaacgttcaaaaagtaggttatttttgactgggtcaattcctgtaatatcaagggcataagaaaccaagcttcccgcagctgaaccacgtcccattcccatataataaccacgacttcgaccaaaacgtaacaagtcccagacaattaagaaataatcatcaaagcccattttatggataactgatagttctttttttaaacgctcttgataagctggcagccacaaatttttagctcgcaatcccgcttctgttcgttcaatcaattcttcctgtgctggcttttgacgattaaatcttggcaattttaaatctgtatcaaactcataatgaatgtttgatacgagcttttcctgattttctaacgctttcggaaatgtctctctaaacgcttgtgtcaaaatatcacaagctaacagattttgtccttgagatgcaggcggagcatcttttaagctaatattatcacgaatagcgtgtagcatgtgaagagtttccacctcattagtttcaaaataacgaaccgtataaagcggaaaaatcggcttttcatatgctttttgaggcgaattaacatcaaccccaatgtagtaatcaaaaggaagcgacaatgtctctaattcctcgaaataaggcactactatggctacaccagtcaaataatcagagagttcgtctagctgaatgtctgaagacatctgtttactcgaaatcttcatcaaatttttataaccggttgtatcttgcgcaagtaggtagagttttaacgatagtgtctcctcaacggcaaaagataactctaacccaacaacaggctgcaaggattgttttttagcctcttcaataaaatgaaaggctgcgtaaagattatccttgtccataattccaattgtttgataacctaaagatttagccgctttaacatacccctctaagtcaatcaagctatccataaaagaatagacagttttcgtgtctaactgggcaaacataaaaaacgctcctttcgttaaaatacttagttctattatacactaaaatagtattaaatttagtttttaatataaataggaaataaagatgacagtttccttgacttttcaaacttatttctgtaccatttatgtagtacaagacttctttgaaaattaaatagaaaggggtatcgtatgtcctggaaatttgatgaaaaatcacccatttacgttcaaatcgcacagcatatcaaaatgcagattatcagtcaagaaattaaaagcggcgaccaactcccaactgtccgtgaacttgccgaagaagctggtgttaatcccaacaccatgcaacgtgccttttcagaattagaacgtgaaggtatggtttactctcaacgaacatctgggcgttttgtaacagaagataccgatcttatcatgcaaaaacgtcgcgaagttgccgaagctgaactccaatcatttgttaacaatatgcaaaaaatggggttccaaatcgatgacatcgtttctgtattagaatcttatatcaaggagaaaaattaggatgacacaactgctccaactgcatcacgttaccaaaaaatacaaaaagcatgtggctatcgatgatgttacactcagccttcctgctggtaaaattattggtttactcggtccaaacggcagtggtaaaacaacactcataaaattaatgaatggacttcttcacccaaccactggcgatattgtcattgacggttatcgcccttctgtggaaacaaagaaaatcgtttcatatctacctgacacgtcttatttgcgagaaaatatgaaaatcaaggatgctttgacattattcgaggacttctataatgatttctcacgtgaaaaagctgagcatcttttagaagacttagatctcaatcctgatgagcaactcaaaaatttatctaaaggaaataaagaaaaagtccaactcattctagtcatgagccgccaagctaagctatacattcttgacgaaccgattggcggtgttgatccagcagcacgagaatacattctacgcacaattattaataattactgtgaagatgcttcagttgttatttcaacacatttaatcgctgaaattgaacccattcttgatgaaatcgtctttcttaaagaaggaaaagtgatcttacaaggaaataccgatgatattcgtgaagagtatggtaaatcaattgactcactctttcgtgaaaaatataaagcttaggaggaattatgttttcaaaacttttaaaatacgaactaaaatccgttggcaagtggtattttgctctcaatgcttctgttattgccatttcatttttccttggctttagtataagatctcttgaagcatatgcccaaaatcagtctggaatcaactctgcacacttcgctcagcttattccaattatcttagctttaatttttggtgtgttagttgctggtgcttggattgcaaccttggtgattattattcgtcgattttataaaaatgtctttgggcgcgaaggttatttaacattgacactgcctgtttcctctcaccaactaattctctctaagcttcttgcttcatttatatggactgttttcaatgctattgtcctagtaattggaattactcttcttgtcttaccaatttctggtgtcggaagatttttaatggctcttccttactttgcatccctctttacaccgactgaatggttaattattttcatttgtttcattctatcaagtctttcaggtattttaatgatttatctttctattgctgttggacaattatttacggatagacgcgcgctcatgggctttgttgcttacttcgctattgctatcatcgtcattattttatctgaaacgattagtggtcaactcacaagagacacatttgatattagtattaatctttttacttattctgggattgaatgtcttattgaggggattgtattttactttgcaactaactatctattgaaaaacaagctaaatattcagtagaaacatcagccaagctgatgttttttctattgtacaacaatccgtttcaaatcacatagttttttcaaccaagaaacctaaaacaagactctcaaaaacacaaactaggcaaaacacaaaaacaaaaaacgttgatataacaacgttttgaaaaactttactaaactatgaaaagctttgatggagccggtgggagtcgaacccacgtccaaacacctgccaatacatttgtctacaaccataggttatgtttttaatttaacttaagctcgatacataactcaaacctagattaagcgagtctattaatctctttttggtcagctagacaataaccaaacgtagcttgttaatcaatgaaacctctagcaaaacacaagcaattctgtagagatcacgcgagctggtttttaggcagctacagcgtaagaatttgtattttttgcagttatatttaactggcaattttacatctgccgatgagtcgcaaaatgtacctcataatgcctgtcgaatccgtaacgaccccagatattataaaagtggaaaaccactctgactattataacagataaagtttaaaatagcaaaaaaacatcacttatgatatgataacattatgaaaacgaaaatgtctaagcgctatgtgttttttcagcgactaatccagtttttaggaattttagccttgattggtactttagctttagtggtttggttttaccgattagggatcttgaatgatagcaacgccttgaaagattttgtccaacgtcaccaattctggggaccattaatttttgttttggttcaaatttttcaagttgttttcccagttatccctggtggtgtaacaaccgtagctggcttccttattttcggtccttggctcggttttttgtacaattatcttggaattatcattggaagtattatcctcttcttgctcgtccgtatctatggaagaaaatttattttgctatttgtaaatgaaaaaactttttacaaatacgaagcaagacttgaaacaaagggatttgagacattttttatcctttgtatgttgtcaccgatatctcctgctgatgtattggtgatgattactggactgacacgtatttctctacgacgttttattctaattatcatgctcgcaaaaccgatttccattatttcatatagctatatttggatttttggtggcgaccttatcaaaatgattttgcattaaattcaaggttagggtgatttgattcaccctatttttatttctaaatcatcttcgtattacttctactgacatgatgaaacccaccatatttacataaaattttcatgtaaacgtttcaagaaccttgaaaaatccctacatagtagtagacttataacgaaggagtttactaatgaagttatacgttcaatttatgattattctggtcttttcatttattggagaggcaatttcaaatttgttgcatttacccgttcctggtagcattattgggctagtgctactttttcttgcgctcgaatttaaaattatccgccttagacacatcgacgttgtcggaaattttttattgaataatatgaccattctttttttacctgcagctgttgggattatggaaaaatttaacgatattaaggattacctgctccctattactatcattattttaggtgcgatcttcctaaacgttgccgttatcggttttgttgtgcaatttatcaaaaaacgttttgaaggagattacgttgataaaggagtccgtcatgaatgaggttatcacaaatccaatctttggtataatggtgtcaattcttgcctatttaatgggaatgttaatttttagacgttttccgcatccaattacaacaccattacttctagctactttttttattatcgcctttctaaaaataagtaacatttcgtatgccgactattacgttggaggaagctacctaaacacgcttatcgttccttcgactgtcgcacttggaataccgctttatcgctcatttcacctaatgaaacatcacatcagaagcattctgtcaggtattttaatcgcttgtattgttaacactacattcacagcacttatcgctaaaacttttggaattaaatacctcttagctatttctttatttcccaaatctgtaacaactgctatggcagttggaattaccgacaaaatgggcggaattacaacagttacccttgtcgttgttgtcatcactggaattttaactagcgttcttggtccagtttttctaaaacttttaaaaatcgatgacccagtagcgattggattaagtcttggtggtacaggacacgctatcggaacagggacagccttaaaatatggtcatgtcgaaggcgcaatggctggtctcgccattggcgtgacaggaatcgtatatgttattattagcccgattgttgctcaaattattctgaaataacactagtataagaaccaagtctgagaaatcatctcagacttttttactatgtagaaattcaagctataaatcttagcaagaaaacaatagctactcaaaaatcctagccaattcatgcataaaaaacgcagcaacaattcaatctttctaaggaagattcccctaattttctttccccaaaattatgagtcaagttaattcaaaacataacaaactttttaatttatatcatccgtactctaatagttttttaaggtactgtaccaaataacaaacattatcttagatatttaggcaaaaaagatctgcaaataccttgatttttttatttggtaatgtctttgaatgactctaaagcttttcgaaataaataacgtttttatacttcaaaaagccttgatttcaaggctttttaggtagattataactctccaccctaagggaatcgaacccctatttcaagaaccggaatcttgcgtgatatccattacactaagagtggcaacttattatattataccacatcaaagtaaaaagaaaagacctgttaaacaagtcttttctaatttattattataattcaatatcgccaaacaagtcagccattgagaatccagtttgagtttctggaagttcgtaatcgcgtttagcttcacgttttggacgacgtggacgagattgacgtttttcttcattttcagcttgtgctggacgttcttcaagagctttgatagaaagtgatacacgttctgcagcagcgttaacatcaagaactttaacgttaacttcttgacctactgaaaggacatcttttggattttcaacacgtttgtgtgaaatttgtgagatgtgaacaagtccatcgataccaggtaatacttcaacgaaagcaccgaagtcagtcaaacgtttaactttaccttcaacaacatcaccagcagcaagtttttgttctacaccatcccaaggtccaggtgttgtagctttaagtgaaagtgatacacgacctgcttcttcgtcaattgaaagaactttaacttcaacttcttcaccaacagaaacaactgatttaggtgatacgttacgttcgtgagacaattcagtcacgtgaacaagtccgtcaacaccaccaaggtcgatgaaagcaccaaagcttgtcaaacgagcaactttacctttaacgattgcgccttcttcaagtttagagaagacttctttacgagctgcagcagctttttcttcaacaacttcacgacgtgaaagaatgaagcggttttcagctggaacgacttctttaattttagcttcaaactcttgaccaacaaatttttcagtgttacgtacaaaacgagtgtcgatcattgaagctgggatgaatccgcgaagtccttcaaattcaaccgaaagaccacctttaacagcacgtgtacctttaacagtaacaacttcaccttcacgaccaacaagtttatcccaagctttgcgagcttccaagcgttttttagagacaaggaaagtaactgtatcagtatctttacctacaacttgacgaagaacaagaacttcaactgtgtcgccagttttaacaaagtcattgatgtcagcatcacgatcgttagtcaattcacgaagtgtaaggacaccttcaacacctgttccttcgataacaacgtttgcttgatcattatcaacagttaaaacttccgcagtgactacatcaccagggtttacttcgctaacactgtttagcaaatcttcaaattcattcattctaaaaaatcctccaacaaaagctagctaatgctaacttttgacaacaataatatttctcaaggtaacccgcaacgacaacaacttttatctttgacggtgtcaagccgaaacttgatacctttgactggggtagctggattcgaaccaacgcatgagggagtcaaagtcccttgccttaccgcttggctataccccaaaaacaatgtacaatctaagacttctcttagaatggaaggggagggattcgaacccccgaacccgaaggagcggatttacagtccgccgcgtttagcctcttcgctacccttccgttacaacaaaaactattctaacatagtttttgttctcttgcaagtacttttcggctttttttagcgattaagattgtaattttcaataatactttcaatcgtttgttctaatgtcttgaagaatgcttcgacttctccactcttgacaattgcaaatttaccgtctagttcagcgatttcaccaatgatttttttaccagctgtcaaagtgtagccttcgactttggcgttattgatttcaaccttagcatcagctagttgaatttcgattttcttatcttttttgctcattctttcacctcactttacccattttacatgaaaacgaaaaagcttgcaagagcaagctttcattttttagttaactttgtaaatccaaccttctggagcttcaatatcaccaaactggataccaacaagctcgtcataaagtttacgggttacaggacctacttctgtttcgctataaaagacatggaagtcatctccgtgttgaacaccaccgattggtgaaataacggctgctgtaccacaagcaccagcttcaacgaatttgtccaattcatcaagttttacgtcaccttggatagctttcattccaaagcggtgctctgccaagtaaagaagtgaatattttgtgatagatggcaaaatagatgggctaagcggtgtgataaattcattatccgctgtaataccgaagaagtttgctgaaccgacttcttcaattttggtatgagtagctgggtcaagataaataacgtcagagaatttgcggtcgtgcgccactttccctggaagaaggcttgctgcgtagttaccaccaacttttgcagcacctgtaccattcggtgcagcacggtcatattcatcttgaatcaagaagtttgttggcaccaagccacctttgaagtaatttccaactggcatggcaaaaatagtgaaaatgtattcatcagctgggtgaacaccaataatatcaccaacaccaatcaaaagaggacgtagataaagagttgcacctgtaccatatggtgggacgaattcttcattggcgcgcacaacttgcttagcggcatcaatgaatttttcagttggcacttgtggcataagaaggcggtctgctgtgcgttgcaaacgttctgcattcatatttgggcggaataattgaacagagccatcttttgtgcgataagctttcaagccttcaaacgcttgttgaccataatgcaaagctggagacgcttctgaaatatgaagcgttgcatcttctgttaattgtccgtcatcccatttaccgtctttgtaatatgaaatatagcgaaatggtaatttatgataggcaaatcctaggttttcccagtctaaatctactgtcatgttaaatcctctttctttgtttttatcttattgtacgctttttaaatcttttttcaagtggtttttcataaaattctgaaaatttattttgaaaataaatcggggacttttccccgacttatgaatttatttgattcgtgcgctaaatacaccctcatcagaaattttatccgagataaatgaaccgttacttgtacgttcagaaaggtttaaatcttctaaaatagcttggtaaacagctcctttatttgaatggacttctaatgtttcaacatcatcagaatctactgtactaatagtgaataagtcaagattttgcacatcattagaagcatgaactggtccagccataaagacacgatgtggttttgatttgagttcgcgtaagacttgcaaaccacgattagcacggcttgtagctggaataagctctgtcgccatacgtttaaggctaccacgttgtgttaagataaagaaactatctgtattggcaacaaaggctgaggctacgaaatcatcgtctttaaggttgattgccttgacccctgctgcttttgcgccaacgactggcacttcttcgatattgaaatgcagtgcgtaaccgttgtgtgtcacaatcattacgtcgtctaacgcaattggtgagatggtaacgacactatcatcagcattttttaacttagcgtatttaactgattttgatttgtaagtgcgccaaggtgtgaattccttgcgttcaaagcgtttgatttgtccaagttttgttgcagcaaagtaggtttgtgaaccgaaatcatcaacaatttcagcatacaaaacgtattcatctgtcgcaaagttggtaatggtttgcgacaagtgttcaccgatatctttccaacgaatatcagtcaattcatggattggacggtaaatgacattaccaagatttgtgaaaatcagcaagtgctgtgttgtcttagcttgtgctacgaaaatcagctcatcatcatcacgttttccaatttcttcaactgtcgaagcgttgtaagaacgtgggctggtacgtttgatataaccgcctttcgttacgctaacaaaggtatcttcctcaacaatcaagcttgctacatcaatttcaattgtttcagcttcagcttgcaattctgtcaaacgtggtgtagcaaattttttcttaacttcacgcaattcacgtttcatgacattgtacatggtacgttcatcgccgataatggctttaagcattgtaatacgttcacgaagctctgcttcttcattttcaagcgttacaatatcagtatttgtcaaacggtacaattgcaatgtgacgattgcttcggcttgttcttccgagaattcatagctaactttcaaattttctttagcgtcagctttattttcagacgcacgaataagcgcgataacgtcgtcaagaatcgaaatcacacgaatcaaaccttccacgatatgaaggcgcttttcagctttttctttatcaaatttcgaacgagcaacgataatttctttacggtgcgcaatgtaacttgtcaacattggaacgataccaacctgacgtggtgtgtagttatcaatggcaaccatgttgaaattgtaattcacctgcaaatctgtgtatttcaaaagatagttgagaacagtttgttcgtcagcatcttttttaagctcaatagcaatacgcagaccatcacggtcggattcatcacgaacttccgctataccaggcactttattattcacacgaacatcatcgattttcttaacaagtaccgctttattaacttcataaggaatttctgtaacgacaatctgttttttaccacccttgaggctttcaatgtctgtgcgtgagcgaaccacaacacgacctttaccagtctcataagctttacgaatgccatctttaccttgaataatcgcaccagtaggaaaatctggtccaggcaagaattccattaatttatccaatttagcattaggatgatcaatgaggtaaacaaccgcatcaatcacttctgctaaattatgtggcggaatatccgttgcataacctgctgaaatccctgtcgcaccatttaccaataaatttggaaaagccgcaggtaaaaccgttggttctttttcggtatcatcaaagttccaagcaaaaggaaccgtatctttgtcaatatcatggagtaaataacccgcaatttctgacaagcgtgcttcggtataacgcatggcagctggtgggtcaccgtccatagaaccgttgttaccgtgcatttcaattaaagtcgcacgattcttccaatcttgactcatacgcaccatggcgtcataaattgaagagtcaccgtgtgggtggaaattccccataacgttaccgacggatttcgccgatttacggaaacctttatcaaaggtattgccgtctttattcattgaataaaggatacggcgttgaacaggcttcaagccatcacgaatgtctggcaaagcccgctcttgaataatatatttggaatatcgcccaaaacgatctcccataatgtcttcaagagacatattttgtacatttgacatgtttattatcctttttatcttacatcaaaaattataatttaagctcatcattttaaacagataatagagcgttactggtcactttcaacgactgattaaaacaccgtattttcttctagagtgaatttgacgttgtcctcaatccatttacggcgtggttcaactttgtcgcccatgaggacattgacacggcgttcggcacgtgctaagtcttcaattgttacacgaattaaggtgcgtgtttctggattcatggttgtttcccaaagttggtcagcattcatttccccaagacctttgtaacgttgtagctgagcacctttaccaaatttttgacgtaattcttctaactcgccatctgtccaagcatactccacttgctctttcttgcctttaccttttgacattttataaagaggtggaagggcaatatagacgtgtccagtctcaactagcggacgcatataacgataaaagaacgttaataaaagcgtttgaatgtgagcaccgtcggtatcggcatcggtcatgataataatcttatcgtagttagaattttcaacgttaaattctgcaccaacgcccgcaccaattgtgtaaatcatggtattgatttcttcgttttttacaatgtcagacatcttggcttttgccgtattcaacaccttaccacgcaatggtagaattgcttggaatttgcggtcacgaccttgtttagctgaaccaccggcagaatccccttcgaccagatataattcgtttttcttaggattcttagactgtgctggcgttaatttaccagaaagcaagcccttatcctttttatttttcttaccgttacgtgattcgtcacgcgccttgcgcgctgcttctctggcatcacgcgctttaattgctttgcgaacaaggtttgaagcaatttcgccattttctaaaaggaaatacgttaatttttcagaaacgattccgtcaacaattggacgtgctaatgggcttccgagtttgtctttggtttgcccttcaaattgtaaatgttcttctggcacaagaattgaaagcaccgctgacaagccttcacggtaatcagaaccttctaagttcttatctttttctttcaacaaaccagacttacgagcataatcattcattgccttagtaatagctgattttagaccagtttcatgcgtaccaccgtcttttgtacgaacattgttaacaaaagaaaggatattatcagaaaaaccgtcgttatattggagagcgacttcaacttggaaattttggtcttcacctgtaactgaaataactggtgtcaacgtttccttatcttcattgaggtactcaacaaaatcttgaaccccattttcataatgaaattccaaatgttctgcttcttctggacgattatctgtcaatgtcaatgtcacatctttaagcaagaaagcagattctttcaagcgctcagcaatcgtgttaaacttaaaatcaattgtcgagaaaattgtgtcatcaggcataaaagtgacttttgtccctgattttgattttggtgctgtaccgatttttttaagcgtagtaactggtttcccaccattttcaaaacgttgcttgtaaacggcaccgtcacgtgtgatttcaacttcaagccagctagaaagcgcattaacaaccgaagaacctactccatgcagacctccagatgtcttatagccaccttgaccgaatttaccacctgcgtggagaacggtaaagataacctcaactgttggaatccccatagcgtgcttaccagttggcattccacgtccttggtcactaactgtcacactaccgtcagaattgataatcacgtcaatctgattaccaaaaccagaaagcgcctcatcgacagcattatcgacaatttcccaaactaagtgatgaagaccagtcgcatctgttgaaccgatatacatccctggacgtttacgaacagcatctaatccttccaagacctgaatcgcatcgtcattataattatttacattaatttcttttttagccaaaagtgacctccaaatagttcatcttttttatattacaagttttttctgatttttgcaaaaaaaaatcaaaaattctgacgattttgcacgtcattttgccttttttcactcattttactgtaaatttttaaaacgctaccattgttttgctttgaataatcaagttatttatttttcaaatttttcttctatcccaacttgaatatgatataatgaaaacatgaaaattttagttttgattgtgattgcatatttattaggatctattccaacaggattatggattggaaaattcttttaccacgtcaatttaagagaacacggcagtggtaatacaggaacaactaatacttttcgtgtcctaggaccaaaagctggtacggtgacgtttatcattgatatgttaaaaggaacggtagccacattacttccgcatattctcggtgttacggcagtatctccgatattgatcggactttttgctattatcggacatacgttcccgatttttgccaaatttaaaggtggtaaagctgtggcgactagtgctggtgtgcttttgggatttgcaccaatgttcctactttatttattgattatatttgttggaacattgtatctctttagcatgatttccttatcaagtgttgtcgctgctgctgtggctgttgttagtgtccttatctttccagcatttggttttttgttaccacactacgatttgctctttacgctaattatcgtgttaatcgcaagtattatcattattagacacaaagacaatatcacacgcattcgaaaacatgaagaaaaccttgttccttggggattaaatttaagcaaacaaaaagtggactagaaaaactagtccgctttttttatgacgcttggtaaacaattttaccgtcacagatggtatatttaacaacaccttgtaatttttcaccgataaatggtgaatttgatgctttcgaagcaaaatggtctgatacaatacgttcttccttatctgcgaaaataacgatatccgcaggaccattttccgccaaataccctgcatcgaaattgtacattgatgacggattaatcgtcattttagccaataattcagacaaagttaaatcacctgtcgctactaaattcgtcaaaccaagtgacaatgatgtttcaagtcctgtcatacctgatggggcttttgtgatgtcatcaacatttttctcatctgcgtgatgtggtgcatggtcagtagcaatcactgaaatgacaccagatttcaaaccttcgataacagctaaacggtctttttcggtacggagtggtggattcatcttagctgcagagcccttaattaacagcaagtcttctgtttttgagaaatgctgtggcgctgcttcagcagtaacattggcaccaagttgttgagcgaattcgaccaccttaacagattctgcttttgataaatgttggatatgcaaatgcgcgccacggtcgtaagcaatcatgacatcacgcgcaatcatgctgtattctgccacacctgttgccccacaaaaatggaatttatcacgtgcaatatgctcattaaacccaagaataccattcaattcagggtcttcttcgtgaacggcaacaaaagtattgttcgctttcgccaaatctagcgcttctttcaatactttcgtgctttgaagcggaataccgtcatctgaaaaactgagtgcaccattttcaagaagggctttaaaatcagtcaagtgttgaccgtcaaagtttttcgttacagttgcatttgtgtaaacatgcacatcttccttagcagcactcgctaaaacatcttttagtgtttttacgtctgaaatcgttggattggtatttgccatcataacaacagaagtgaaaccaccagctgcagctgcaagagcacctgtgtgaatatcctctttgtgtgtttgccctggttcacgaaaatgcacatgaatatcaaccaaaccaggtgcgacaacaagccctgtcgcatcaatgatttcagcgctagcttcttcaatcgaatcagcaattttaataatttttttgccgtcaacaagaacatctgcaacctgatcaaagccagattttggatcaacaacacgaccatttttaattaataacatactaaactcactttctaaaattgataagtttcattttcagcatttatctgcgacaatgcgccatttttgatacggtaagcttcaccgtaaatcatttcaacagttccattcccatacagaaaactaccgtcacaaatggcataaaaacagcgaccattactatctggataagtaatatcttcgaaaacacgaagcccatcaagcatgtgatgctttgtttcttgatagtgtggaattaactggacttgggtaattccaagaccagctaaaaagcgctgataatcttttgaaatcgcttcgcctacttcttctggttgtgcataaacaagctccgccgcattcatagaacctgcacttgagccgatgacaagtttatcgctactttgcagcagttcacgcataccaactgaattcagaaaagcattctgtgtaggcacatgcccacccgctaagaaaatcaagtccgcctcagctaccaagctggaagcctgatttgccgttcgattatccagcaccacatatttttcaaatgtcatgccttcggcttcaaaagccgtttttacatcagcagcatattgatctgtaaacgtgttatcgttcggatccgaacatacaaaaagagcgctaaacttgctaggcaggtgttctttcaaaagattaacaaaagcatttgcgggattaagacgtcttttttcataaatgatgggattacttgctaaaaaataaatcatctgtttttcctattattttaaccaatcgattgcttcaagcccgtcttgagttaaataagcatttgctcgcgaaaaagggtggctaccaaagaaaccacgatatgctgaaagtggacttgggtgtgcactttcaatgacatgatgaattggattagtaatcaacgcctttttcttacgagcatatccaccccaaagaataaagacaactggcgtttccttttgattgactactttaatgatagcatctgtaaaaggctcccaaatctgtcctgcatgaccattagcacgtcctgcaggaaccgtcaaacacgcatttagaagcaacaccccttgctgtgcccatggtgtcaaatcatgatgatcacgttgtcctaaatcatctgataattctttaagaatattttgaagagacggtggtgcaggaatattctctgggacagaaaatgacaatccctgtgcctgattaggtccatgataaggatcttgaccaataatcaccaccttaacgtcctctagcggagtggtctgaatggcattaaaaactttctcacgtggtggataaatcaactcctgctgataaacataatccatgaattgatttatcttgccaaaataatgctctggcaattcttttttgattaactcatgccaagttgaatgttgcatgtttactcctttttgtcttagtatttccctactaaatctagtttttcttttgctaacacatgtccttccatagcatgcaatagctcattcatgtagaaaccatttgccaatggtaattcacaatctagtgcataaactgtaagggtatagatatggtctttatcaggtggatatggtcccatatacccttcgtcaatgtctgagtaatcctcatttagtaatttactaactaagctattcttgccatgtgcatgcttattgtctagacgtgaaaaatcttctgaaatcactgttacgtcagctgaaacattggcaacaacccaatgaatataagcaaaaccgcagacaggaatagaatcataatcaacaaatgtccatgcaaaacttttcgtcttttcaggaacatcttcaatcgtaaacggaaaagaaatcactgcatttccctttacttgtacctttgctttcttagcataaacatctggcaaaatattatcttcaaatgtacaagaaagtttcatcttttttactcctttcatcctttaaaccaagaaagccactaaagcaattttactttagtagccaaatactaaacttgattaatcacgccaagtttcttgattttctttaaatttatgtagtaattgaaggtcgtcagctgtgatataaccttgcaccttagcaactttgattaattcagtatagttagaaagtgtcaccaatttaacacctgctttttcaaagttttcagttgctttaggcaattcataagtaaagatagccacaactccgatgacatcagcaccttcacgttctgctgctgcaacagcttctagtacagagccaccagttgaaataaggtcttcaacgacgaccattttttgaccttttgtcacacgaccttcgatttgattaccagctccgtgatcttttggtttgctacgaatgtaagcaaatggaagattcatcttgtcagcaataatcgcaccgtgagggattcctgctgttgctgtccctgcaatcacttctacttcaggaaattcttctttgattttttcaacaaaaccattttcaatcaatgtacgcgtttcaggatatgaaagcgtcacacgattatctgtgtaaattggtgatttaataccagatgcccaagtaaatggatcgtttggtttcaagtaaacagctcgaatatcaagcaaatctgatgcaatttgtgatgctaaagtcataatattcctcttttctataataactcaatggttgatgtaaaatattgttctaaaaaatgggttgcctgttttatttggtcataagtaactatttcaccagcggttgttaaaatccatttagtctccacatcatcagcacgatgaataatggctactaattccccttcgaatacttctagaggagctgagacattctctgaaataatatagacatcttgccactcaccgtcacctccaatcagatttggaatgtaaccataattgattggatagttattcccgtatctatcttgataaccgattggtctatcaataaccgctgtgtaagattgcctcattgttaactccataccaaccctaaaacaattttagtattccaatactaagcattccattcatcgtaaatggctttgtaagccgcaacaggatcatccgcttttgtaattgggcgtccaacaacaatatagcttgagccaatggcactagcttgacttggggtcattacacgtttttgatcgccgacagcagctcccgcaggacgaatacctggtgtcaagcaaacgaaatcttcagaagttgcgtctttaataactgcaacctcacgtgctgaacaaaccacaccgttaagaccagcttcgtttgctttcttagcataatgcaaaacagattccactaagcttgtttggatattttgatcagctttcatctgttcgtctgacgttgacgttaactgtgttaccgcgattagtttcggaccttgtccaagaccttcacgcgctgctttcatcatttcaacgccaccagcagcatgaacattagtcatatcgacaccaagatttgataacacacgcatagctgattcgactgtatttggaatgtcatgtaattttaaatctagaaaaacagaatgtccaagcgatttaacataacggacaatctctggtcctgctgcatagtatagctccataccaatcttaacataaagtttttcatcagcagggaacaaagcaagaaatgatttcacatcatcaaatgacggaaaatcaagagcaataatcggacgactttcgtgcattttttctcctttttctataaagaaaacctcgccaaagggcgaggttacacgaaaagcagggtagcaaacacccatcattcaaagactttttatcttcttttttcacgaacctttctcgcctctctggactcaattaaaggttattcagttgttaatattatatctttttttactggtaaagtcaaaaacttacttgactttttggaaaaatagcagagcttattttccacgtaattcttgcctaacctcacgtcgtaaggtttcaagattttcaatgccgtatttatccataacttctggtaaacggtcaataatatttggacaagcatatggatctgcaaaattagctgttccaacgccaatcgctgacgcaccagcaatcatcatttcaatagcagcttctgccgaatccacaccacccataccgatgattggcaaatccgtactttgcgccacttgacgaatgagttttagagctactggaaaaaccgctggaccgctcatgccaccagtgccgttagcaatgattggcttacgagttttcaaatcaaatcgcataccaaccaaagtattaatcatagtaaatcctgttgcaccagcttcttcaacagccttagcaactgttgtgatatcagccacgctcggtgttaatttaacataaactggcacatcagaatgctcaacactcgcttttactgctgcataagccaattctggcacttgtccaatcaacaaaccatggttaccatggtcaacgttaggacaagaaatattaagctcgatagctttaacatttggagcttttgaaatcttttcagacacataagcatactcatcatttgaaaagcccgcaacattggcaataatcggtaattctggataatgctgtgctaaccacggtagtttttcagccaaaacaacatccacacctggattttgcaaaccaatagcatttagcattcctgacggcgtttcagccacacgcggtgttggatttccaaaacgagcatctttggttgtcgctttaatcatgattgagccaagcttatctaaatcgtaatatttagcatattcttgaccgaagccaaaacaacctgacgctgggataattggatttttcaagtcaagccctgggagactgaccactaaacgattttctgacataagacctccttataagatgattttaccagtttcaaaaaccggtccgtcttcgcacacacgtttattagccgcttcttgtgcattttttaaatgaacaacacaagcatagcaagctcccataccacacgccatacgcgattccattgacaggtaggcatgcggatgattttcaaatttttggtcaacgtattttaacatgcctggcgcaccacatgaataaatcgcatcatacgtttcgttttgcaccaagtcatcaacgactgttgagacatagcctttgataccataagagccgtcatctgttgtgacataaacttttccataagctgacaattcttcttccagaatcacagcctctttattggcaaaaccaagaacagaagtgacgtcaacacccttagcagcgagttgtttagctgtctcaaccaatggaggtacaccaattccaccaccaattagcaacgctttttgacctgatgtcaccaccgacaaatcgaatccattcccttgaggccccattgtgtcaacacggtcaccagccttcatttgcgataaaatcgctgttcctgcacgctccacacgatacacaatcgttgccactttattaactttatcaatctgacaaatcgaaattgggcgacgtaacaatttacttgggtcaggcacacgcagatgtaaaaattgaccaggagccatatccaagaccatttctcctgataatgtcatctcaaaaatacgtggagcaatctctctttgactaacaataaataaatcttctttcaacaccaaaggtttgtttttacaacttggattcataacattcctttcacacaaaaaaacctcgccagaaggcaaggttacagcaaaataagcagagtaaaccaaagcacactcataccttttattagagttaaaactctttttacagtaaccttgaaagtctctctggacttaattaaaggttttcaaatttttattattataacgcgttttaagatgattgtcaattagttttgtaagaatgattgttatcgttaacatcatttaaagtttggaagttctaaaataaaattagtcagtcgagcatataaaaaaacatctcagaaagatataattgtaatcgctacaataacaattagaaggactctaaaatgcaagactgttatacaccgaaaggcaaacatttatcactaacataccgtagaaatgttgagcgtcagctccaagaaggacactttgttgcaaaaatgctatcagttttaaaatttaacaccatccaaaattatcaaaactctcacttatttctaaatcaccacttctaagttgcataatagcaatttcaaaaagtgctttcaagctttttctctcttttatagggacttctgcatcatctcttacttatcgacataatacccaaaaataaaaagaaggcatcaagtgaccttcttttacttttattcataagccttgtaggctgaaatgtgtaaatctgaacgatttgaaaagtgctgaagctctgataaaagactttcaaagcgactatcttccattaatagattttgcccatagataagaagataaattggttctgttggctcactcgttaagtttccttcgtcatcaaatgtttcttcgtcacgttcttccaaatcttctaagattttttccataagaactagaatatctgatatttcatcaaaagcaccctcaaaacgatcaaatgcattgtaaaatttgatttcacgttttaaatcatcttgagcatctgcaacataaatcatccctttatggtcaaaaagataatgacggaattgcttgatagcagcctcacgactaatttctgtaagctcaagctctgactcttcctcatcaagaagcgtagcaagaggagcatcagatacactctctgtctctttaaactcttcttcgacctcagctaccgattcggtagcatccgcaacttcaggctgaacactagcaacctcttcttcaacatcatcagacggttcttcctcgtcaacctctggctcaactgattgcggttcagctacaagctcatcttctttattctcaaggataggagcatctcggacatctttggctttatcaacttcaatactctgttctgattttctaggggtcaaggcatcaattttagccaataattcggcttttttcgtttcccttttttgatattctaccgcttgcaaagggtcaactaaaatagggtattctgattcttccttgattgataaattggtaattcgaattgaagtaaaaacatcaatcagcacgccaaaaacacgctggcgcttatcaccaagaatcgcttgaaaaacagattttgactcacagatttctaaaacattatcaatcccacgaatccaattaccgacaatatccaaagaatgattcatcaatctgaaagatgcttcatcataccaaaatgttgatttaatcaatttttcttgcttagaaagcgcatcaacagccgccaaaatttcacccaattctgattgaaccacatacggcgaaaaagacgcccccaacaatgacggagtcttttcaaccaaaacaatctcatctctgaaaagtgtcaagtaatgaatactaacaagtaacttctgaatcaacaatcgatgattatttgaattagtattttccatcacttccaccacttacctttatctattaatattacagtttcgttacaatccgttactattaatataacatatgctaggcaaaagagcaacgaaaaagaggaggaagttagcaaagaaagacaaaaaacgaacgatggggaagaaaatataaatcctacaaaaggaatcccccatgtggactatacaactgaatcactttatttttgaataagaatatgcgttaaacacaaaaagtgagaacaaattttgttctcactaaggtataaatcctgtcactcgtgataaagaatctaaatatttattttttaatagttaaattaaacaatagccaactttcattttttaaaaggatcgataaaacaatataaataatcccacctataacaatttggattatcaaagttagcaacatgttcaatccactagcaacaccaataaaatatacaactcctcccataattacagctaaaataacattttttaggaaatcgccaaaaatttctaaataactgtaatttaacaacttagaggaatagtatgaataaattaataaagctagaaactctataataatttctgatattgcaatatatataactccaaaacgtattgtaaacatcagaatgatcaaagccagtattctgacaggaatatccatttttaaaacaatatctgacctaccaatagattttattgcttgtaaaattgcagtttgtgatgccctaattaataagcatatgcaaattattctaatatacggaactgctggaagccacttatcggtcattacaactgaaactatttgtttagcacatacgaaaaaacctatcaaaattggactcattatataggaactaacttgagctgttcttttagttaatactttaattctatccaaatcagattgttctctagacataactggaaacattgttttactaacagcagtatcaacatttgttactattaagttaggatattgatttcccttagtataataagccaagtcagcaggagaataaaatccaccaatcaataaacttctgatgtttgcgtatatggtattaaacaaagtttgaataaatatttttattccaaaatcaaaaagaatttttaatcttttaaaagaaaattgtaatgttggccgccaccccacagaaaaccataataccacacttatagttacaacatttgataaatcttgagcaactaaagcccatacaccgaaattagtgtaggccattactacccctataatacctgatacaactgtcgcagttactgtagagatgaaaaattttttaaataacatatttctagaaacataagcttgttgtactgaattcagagctgatagagggatttttaaagctaggattttcaaaactaattcaagttgtggtaaactataaaacgccgctaacataggagaaatagcgaacacccctacataaagtaaaaaacctaataaaatactaaaatataaaactgttgaataatcaatctgttcaacatcttcctgttgaatcaatgacgcactaaaaccactcgtcatgaaaacatttaaaattgtaattataacagtaacaatcgataccacaccataatcttctggtgctaatagtctagttaaaactatagtaactattacagaaacaatctgtgacataaatctctctgaaagtgtccaaaaaagtccttttattacattttttttagagtttatcattttaaaataatccttttaaattgaatattatcatccacagtaataattgttttttcgataattaatggaagaatgactatcaactgcaacaataaatggttagtaacctcagtataaccagctataatgtatgcaaacaaaccaaaagaatacacacgagcaatgggattattccagaaatgttctaatttccaaaatgcaatatagtaaataataagtgtgattactactaaaataactcctccctgaaatccaagatttaataattgattatgtgcatgtgtagcccccttccaaatataattaccaaaattacccagaatttccgcaacctgagttgattgtaattttccatatcctctaaaaatacttgtatgatttatagcattcttccaaatcgtagtcctatttgtaaaagttaagttttttcctaaaataccttctacaataggagctaaaaattttacattatttaaaattacaatcacaaactgaatcaccatagatacacaaaaactaatagttggtctaaatacacgattaaaatatggtatgacagctaagcacaatataatagcggaagaaactataagagttgatgaagtctggaataattgtgtaacaagaattccaactaccaagcataaccaacgcttactttttctcttataaaacctgtatatcaaagcaattattaagcctggtagcaaccaactaataaaactatttctcgacccaagaaaccattcataagttgctccataagcaacattagaacgactaaataacctttctggaaataatattaaagaacctaaattaatatagatacataattcaaagtgtagcataagtgcctctaatagcgaaataaaatcatcgctatatagttctattaagagaactaaggtgcctaacattataaaattaagaaattctgactcgatttgaccattattcagaatagtaaaaataagtactattaactcacctactaatactaaaatctgagagatagataaagttttttttcgttttataaaatatataaaaatgaatagtgctgtaataagcttcaaaatattataaaggatcccctcatgaggcaaaatagaaatataagtaggttcaaaaaatataattaatgccaaaaaagcgatcaaaacattcttttgaatttttatcataccataaaacctacataatctttctaataactcttgctggagagccaactactacactaaattctggtatatctttagttacaacagaattcgcaccaattaccgtaccacgaccaattgtcacatccggcattatacttacatttcgaccaatccaaacattatcttctacaataaccggtcctttactccaaagttctctttctgctggtggtatattacactcgttctttgagcttcttccatgaaaattatcagttataaacacattgtcacctattaacacattatttccaataacaattttattagcacaggttatataacaattatcaccaaatgaagtataatttccaatcaataagttcggagtattgaaaaaattttttcctctgtaactttcccaaacatgtagttttaaaaattttctggcaacaacaccgtttcctaaagatataaattttgaacctttaaattcataaaacggtccaattgacacatgtgtccccactttctttagctttttcttatttattaaccatgaaagtttattaaaaataattatcggatgaaatactttaaatatatattctttcataatatcccctataattctaagcgattaaaaaaactatttgttaattttgaatttcctttgtgagaccatgaaagtttttgaggaatttttgttaattgctttaaggagtaaatattaaaatctttatcatatagttttggtaataaaaacatatctgcacagacaaacttcgtttttgatagaacatcattatcaattttattaatcttacatatgacaaataatgcatcaataaagaaataaaacggaaattttccatataataaatagtattcttcaaacaaatcattcataacagttacaaaataacctccctttcttgaagctataaaataacccgaccaagaacatacttcatttttatattttaaaaaattcatacttgatgtaaatgatatagtagcaaatgatttatccttcaattcttcaaaaatatcaaatttttctaagaacagaattgttgcatcaatccaagcaccaccattattttttaaaagattaaatctcaaaatatcagaaaatgtttggattgaaatatctcccttataaaaacctttaagtatttctggatgaatatctgtataatcttcaaaattattcttagaaacctcaataatatttgaatcaggattatatttttttactgactctaaacattttcttacaatatttggtgcactttcaaaaccatcccaccaaaaaacaaaaatattcttagataaagccgtctcttccaccggagtactttttccgacatattttttcaaaaaaggtaatacctcttgctcaacgataggaagtttatttattaaatcttcacgtgcgttccttctatcttttctatattcagcaaacctataagctttataaaagcctgactttctaatatcttgtatcctactaggaatctctcttaaaaaaaatttagccaaagatttaatattgctcaacgtagaaaagcagaacatatattgattacctgttaataattttcgtgaatttagttcaatttttttaattttatttgaacaccctataaccatctgacttagagctttttgatatagtgtatctttttttaaatatttaaacaattcatcaaaagatttatccattacttttttctttttctggaataaattctcaattaaaaaaaaataaagtgctaatgcctgatcttcactaatattagacagttgttttattttattatacgcaatcctacttttttgtattcccgctctaatgtcacttgaattcatcattgaattttgatttccaatattataaaaataggaatttgggtattcaataacctttacttttttactcttgtttaaaacaagtgaagtaaatattgtatcttctcctaagctaatgtctttacaagcctcaaaatcctttataacctcttttactaactctgctctatataatttattccatctagaaataaaaatcttatttgacacagatatatttccggattcataaataaaattacgagtcagttcctttaatttttcaccagtatatatacctgttttatataaatagcacggtgttaaagttcctagattatctaaataatatcccatagaaataatatcagcaccttctgtcaattcgttgataaaattctctatgaaatcactatcaactctatcatctggatcaagaaatgcaacataatcaccagtagcatttttaatcccgtaaattgttgcatcaactaaaccaccgttatttttttctattactttaatacgattgtcatttgaactatatttttcaatgatttcatcacttgaatcaatagaaccatcatttacaataataatttctatattagtatatgtttgtgataacaaagatggtattgaaatatcaagatatttttcctgattataaacgggaacaacaattgaaatttttacttttttattcatcatcttctaattcttctctaagtacttgaatgtacctctttccataagtagtatcaggctccatataagctccttcagcccattcattccaggaatttaagaaaattatcctatgctcaggatttcttttttcaacacaactaattgcatttttcactgctattctaaattcttcaggagtattttcataatagataacggcttttttcccggaacgtggagatcgatcgcgaccagggattaattgaggataaatattttcttgaaagtcctccttagtattaaaagagcgaataatatctttatatttatacttctcaacaaaaaccgatgaaaaatatttcctaactaaagcataaaacactttttttatttttccatttgcattcaattcagcatatttcaaagtatgagaatttattgcgtcaaacccaacatctagtattttctgatattcgttctgaaaattctcctccacattttttatattatcaaaacctaatgtaccaagtggatcaacctttgcaacaaaatacattcccggcaaaccattttcatacgccattttcttccacaaatcgacaaactctttaggattcggtagattatttggatcccaaacataaaacaatggtttcccatcaaccgtaatgtatctcttatcttttaacgcaggtaaaatttcataaaaatgtttcttataatcctcaacacctggatacttttgctcaaaaatcattgtgtcatctgacctacttttatccttggcccatgtttttgttgtccaactatgattggcccagcctaaacaaaaaggaaaatctggctctttagattctaaaacttcattaaaaggtcgctctaacgtccgaacaccatttccaaaccaataatgccaataacaaaatccttcaattccagcttccttggccaacttagcctgttcttcacggatttcaggcattcttaaatcataaaatcccaaatcagcaggtatccgtggttgattatgacctctaaataaaggtttagcctttgcaacattagtccactctgtaaaacctttcccccaaaacttatcattttctacagttggatgaaattggggtaagtaaaatgcaataactcttgctttcatttattatcctttactattttttggtaatatgtatctggttgattctgtttttctttagaaaatttatacgtcaacttatggattgatgtttgataaaaaattgcatctagcatttcttcttcatagttatcaaataaccttaataaaagcacatgtggcattgcacttgaaataggtaccacttttttccattcatcattaaaattttcaactactaattgaaaaaacatatgaaaaataaaataatgaatagcactattatgctttctccaatattcatataataactcccttgtcatcattaaaattggattatttgttgttgaagtgataaaccaattagaaactgacaaagggttaccatctaatgctggcttcaatttttgatacatgaagaaattcgaattaaaaataaaatcgggtatatttctatctgatataaaaaccgtagcatcaacccatgttccaccataattttctaatagctctaaacgaagcaaatccgacatatgagcttttccaatcagtcccttatcaatttttgtttgaataaactcaggaaaggtgacataatttctataattttcttctgttaatagaataatatctttatcggttaaattattaactaaggaattatagcatactttaactatttcaggagcattactcattccctgtaaccacatcacccacactttatcagatgatttacgattagtagaactatttaaaatcctctgcttatttttaataatatacggtgtatattttcttctaagtttatttaaaattttattatcaactgaatttcgaactatttctaacgatttcttagagaatccttgagaaagtatttggaaaactgcaaagaagaaaactcctgttttaacatactgctttattatattgacaccgtttacttttttaaaaatcttaaaaaaagaattaaattttttattcattttatggctttaaactttctaaacgataatgtgttttacggctatccacaggaggtaactccatataatctccatatgtgtatttcaaatactcgtgatagttatcaaatccaataagttcaatatcttcaaacttatattttgttccctcaccataccattcttttggaactatctcacgtgttctataagctcccatgatattacctatgtaattagaattatcgatattttgatgtgaaagtaatctatcaattttctctttttcgttatatggattaattattttttcaaaaggaattttttccattccccaaagaaaagcactttctagttttccacgttttcgcttcctatcgattgaatctttataatgcaatgacattaatgctctgtgggtcaatactctaaaataatatattttcctaagtaatttattatttggggtaccatcaattggaaaaatatcaattgatgcaaaagtaaacttcgagtcattaccgatacgttcctcaattaccttaacgtttgtatcttgaacccttgtaatataatattgatatgatggggtattcttatagttaacaatttgtagatgactaggtagctcatcttctgcaactttcaaaaatttctcatagtccttacgaggcattcctaaatcaatatcatcatcccatggaataaaaccgccgtgacgaatcgcaccaagcatcgtaccgccaagcataaaatattttaaatcatatttttcaaaaactttaatgacactctttactatttctaaatcaattttatgtaatttttcaattggttccatggttatccctttacttattcaaatctttttttatctgtgttgtagaaatttcaggtgtgcgcggtaaatagacaacttctacaccttcttcttcaagaaagtcaaatttacctttccagtcatcccccattacaaatgtatcgatatgatactcatggacatcagattttttttgttcccagcttgtttcaggaatgacaagatctacataacgaacagcttcaactagggctttacgttgttcgtaactgaaataacatttcttctgcttctcattccaattaaattcatctgatgagataacaacaacgagatagtctcctaaagctttagctcgtttcaaaagattaatatgtccataatgtagaaggtcaaatgttccataggtaatcacacgtttcatctcgtttccccttttattttttagtattgtattttcaaaagtgatatctaaaattgatttttcacactcagattttttatctcgattcatcaattcttttactacttgagctggattacagcctttattgataatatcgttgaccgcaaaaataattggaagttcaatctgataagtctctgataattctaaagctgctggtagcgcattaacaccctctacaaccatttgaactttatccagtgcttcttgaactgagtatccttgaccaatgagttgcccagctttattattacggctatgttcgctagttgctgtaacaattagatcaccaacaccagcaagtccctcaaaagtgctttctaaacatcccatcgctaaacctaaacgtttaatttcagacattcctcttgtaattaacgctgccttagcattgtcaccataacctagtccttgagaaattcctgcagctagtgctacaatattttttagcgccccacatagttcaacgcctttgatgtcattattagtataaacacgtaggttttcactcataaaaatatcttgaacaaatttagcaacggtttcattttcacaagcagatactatggtagttggcaagtcaagtgcaacttcctcagcatgtgtaggaccagataaagctacaacttcaatgttatcatgtttcccatctttctttatttcagttgtaatcacttctgataacatatagtgagtttttttctcgattcctttagcaacatcaacaattatttgatttttaggaataaactcccgaatttttgctgctgtctcacgtacaaatacagatggcacggcaaataaaatgatatctttttttttacaaacttcttcaattgattttgtaaaaacaatattatctggaataaccatgtcaggcaatcgattatttcgacgtgtttctactaattcatcaatttctgatgggatagctgaccaaacggtcacattattcccgttcaatgaaagtacacgtgctaaagctaatccccatgttccagcaccaataacacctattgaaaacaattaatcaaactccccaaacaatccttcgtactcatcaacaataaaatcccaactaaagtgttcttggacttgttttgttgacagtctatctaattcatcaatttgctcttgagacattgcttctgcatcttcaataaccttatgaagattatctttatcccaataaattgctccatcttcaccaacttctttgttaaatccaacattaagcaagagatttaacttagttgaagataatgcttctaatagtgatggatttgttccaccaacttcatgaccgtggaagtaagcatatgcattttcacgaatatatttaagaagttcttgattataaacagttcctacaaatttgatgcgagagtctttgtcaaaacctgtttcttttttcagtttttcgtaaaaggcattttgttcaacattagtaatcaatacaaaatctttttttgtatttgacttcataaactcacgaagcattgcctcatagttattttctggaacgaatcgtccaacaacaaggtaataattattttctgaaactcccttttctgaaaaccattcacgtacgacacggtcttttgaagaaaggctagatttttcaagctctgttccataagcgatgtaagttgtctttggtgaatattttttatagtcatcttggatatatttttcaatattcttactatcacataccaataaatcagcatgttttaccatcaatgactcagaaactttccaataacgacgaacaggggcactccatttttgacgcatccattcatgtccatctggattaacaaataattgaccaccaagagcgtggatttgctttttaaaatgattaatgaatggtccgatgcgacaagctaaaacataaaaaattggattaacatcaccattttcttttgcgatttcaatcgatctgtttagagcagcgatgtcataggcaattgctcgtgcaggaccaatatttggcacatcaatattaaaacaagttgctccattatgttcaaaaatatcatctgtgatatttgatttagcagagttttctcgcatacatgccacataatatttgatatttttatctttttgattttcagttagtttttctacaaaggtttcaaacccaccataatttgctggtattccttttgaacctataatatagacactttccattttttctcccaatacaagaatgaagagggactctacctacttccctctctttttagtacgactccaaatgttttggcaataattttaatatcttcactgatgctccagttttggatatacttcatatcaagtgccacgacttcttcaaagtcggtaatgtcactacgaccgctaacttgccataagccagtgattcctggtttggttgttaagcgtttgaaatgatgtaactcatagtgatgatactcatcaagcgttggtggacgcgtgcccacaacagacatttcaccttttaggacattgataaattgtggtaattcatcaagtgaccaatcacgtaacttatgtccaaatgggaagatacgagggtcatcttccatcttaaacattaagtcagtatccaaatcattttgcgctagtaattcttttttgcgttcttcggcatcggtgtacatgcttctaaatttgtaaatttcaaaaactttaccgtttttaccaacacgtttttgtttgaagattagaggtcctggtgattgtttcttgactatcggtgcaataataatagctacaatcccagtaatcactaagccaactaaagccattgcaatatccataagacgttttaaagcaacttgacggaattttacaatattgaatgctgtcgttggaattcctaacaattttaagcaatgagcaaattctataaaatcatcttggtgatttttggcaacaaatatctcgtcaacttggtgatttgccacaaaatctctaatttctttagtactttttaagataggctgtaaaatgtcaggattatcacgacgactgatataagcagcgatatggtaattggaattattaagttctttaatgacttccttaccattcgtaaaatccgtgacaaacaatacctgtttaatatccgttgcatgacttttgaaaagattcttaactaaaatacgtccaatgaagacaaaaaggcttactaaaataaaaatttgccccaagaagaaataagacatctgtgaaatgtcatggataaaacgaatttttccaagtatcagtacaaaagtaaataaaactaaaactttcataccataaatcacagatgctttcaattcttttaaataaccacgatttgtaattgaagagtattcatcgctcaaaacaccaacaatcacaattaaaatcccaaaaacaactgcaaagaatttactatcaaaaagatgataaggataaaattgtgctaagatgaggtaacttaccactaaagctataatatccgacaaaaggtaataaactttctttttcgaatcttcgctatacatataactccctgttccctattctaaggtaaaggtatcagctatttttttcgtttacctctaccaatttttgttttttcttcactttttccgtaattgccatagctaccatacccaccgtaactaccatatgaaccatacttatctaagtgaatatcatatttattcaaaataacgccaaggaaaactgaaccactctgttccaattgttcctttagttttgtaactgtacgacgtctatcttctcctgcttttgtcacaagcaagctagcatctgaatggtgtgctaggatagcagcatcaataaccaaaccaagcggtggtgtatcaatgataacatagtcgtaaagtccacgaacagtttcaatcatcgctttgaagttatcattttgaatcaatgatgttggatttggtgggacttgcccagcaggaataatcatcaaattatcaatacttgtgtcacaaataacatctgacaactctgcatttccagacaagaaacttgtcaacccctgataacgttcattagatttaaacgttcctgacatgactgaattacgtgtatccgcatcaatcaaaagtgtacggaaacctgcacgcgcaaaagaaattgcaaggttaacagacgttgttgattttccttcgccaggttgagccgaagttaacgtaattacttttaaatcacgtccactaaattgaatattggtacggatagaattgtaatattcctccatagatttaaccatttgagctttagctctcactaattctaactgtggcattacaatttttctccttataatttatcaatatctggtacaactcctaaaagtgtcataccaagcacttcttcgacgtcttctggacgacgaacacggtcatcaagtacttcaagcacaagaataccaacaatagccaagaaaccaccaacaagtgcacctaaagcagcattgcgtttaatatttggtgatgatggtttgctagcgacttcggcagcttccaaggttgtcacatcatctaccttggttacagatttgattttttctgcagcaacttcacggatagtgttagcaatatcagaagcttcttgcgcatctgtatcttcaacagagattgaaataacacgtgtatctgttggaatacttacagaaatcatatttgacaattcacttgtagaaagtgacaggttttcttggtcaataacagatgacaaaacttcatttgacgtaatgacttctttatagtcattaacaaggtaagaacctgcttgcaaatcctgattggtcaaactgctgtcactacttcgactcacaacataaatacgagttgttgatgtgtacttaggtttgataaaaaagatactaccaagtaaagctactatcccaacagctagagcaatgaaaataatgaaaaattttctactccaaagttttcttagcaaatagagcacatcaatctcgatacttgcattatcatttgaattcatattaactcctataaatctttattttctaataaggtttgaggatttccctcgaaaagagtataagccctatttgggccaaaatcttttgtaacgatttccctagcttcgtccataaatggcggtcttggtccaagattatgcatatcgcttgcgacacaatgaacaagatttttttccaagaaataacgtgctcgttttttgaactgacggtatttatcgccaaataattttggtttgagaacatgtgagctattaatttgcgtgtaacaccccatgttaatcaattccttaacacgttcttcattaaattcaagcgcattataacgttcgatatgagcaacaactggtgtaattccaagcattatcacattgctaagtgctgtatgaatctctttccatggtgttgtcatactaaactcaatcaatgcaaaacgtgtatcgttcattcttggaacttgatgatgttccagtctttccagaatatcgctactatagtagagttcgccaccatataagatttctaagccttcatatttggcttcagcagcttctttgacttgactaaaattagcaaaaatcttatcttctggtgtttcaaacattcctttgcgacgatgtgacgttgagacaatcgtacgcacaccctgacgataactttccccaaccaaagctaagctctcttcaatagtagttggtccgtcatctacatcaaaaacaatatgcgaatgaatatcaatcatctaattaccttccataacatctttaatggcttgtgatgcacttgctacactagcatcatccaactgaatcatataaagacttgcagttggcatggcataagaagtcaattctcctgttgaacctgtaccagttacttcttgtgatgtaattgtaaatttcttacctgaatcaagctgagcattagcaaggctcatcattgtatctaatgacatatccgtttgaacagaatcctgcaaggtagaaataattgttgagtaatttgaaattgaactaaatgatgttaatttattaatgattgcttgaataaccttaagttgattatttccacggtcatagtcaccatttgtaagactgtaacgttcacgaacaaagcctaaagcttcttctcctgaactcaaattaacattaccaacttcaaaattataattaccatggagacttgtaaatgcctgatcattataaactgttacaccaccaatagcatcaataagactcacaaatgatgtaaagttgatacgagcgtaataatcaatatcaataccgtaaagattttctagtgtcttttcagatgtttcaacaccatagataccagcgtgtgtcagtttatcgtattgatctgcaccgccgtctggaatttgaacatatgagtcacgtggtgttgttgtcatcaaaatcttatgtgtattcatattaactgtcaagatgatattaacatctgaacgtgaaacggttgaaatagatccgtaggtatcaataccactaatataaatgttaaagacattagcatcagatgattttgcttcgcttgaaacactcttcttaattttataagtataaattgttttcaagtttgattcgtaatcattatatgataattcaagtaagcttgaataagcactgttcaagaccattgcctgacttgagccattaatcaaattttcataagcggcttgataagaatctactgtttctgtcgctaaatcaatacctttatcagatttgatttgtgagattaaggcatcaatgttgctgccgtcagcattagtcggtgcttgaacgcttgataattctgtcacatctgaaatcgagctatctgctggcaccacaacactcatctcaatttctgaatatgaggctgatttattcatatcattagccacatcaaccaatgatttaaaagcaaaaagtgaaatagctgcgacaattgaaaaaataaccaagagaaccgtcacaacaattttcccttttttccgaattatcaaaaccaaagatataaggaatacagcaactagtaaaacggtgtaaataatattcagatgacgaaaagctagaatattattggcatacatgagataagttgcgattcccgctaacaaagcaaacaacactaataaaacactatttactatcgtcttcgtatcaaaacgagaatatgaacgtgaactcttatgatgtcttctatgacgtgaatgtgtaggcattttaaatctccgattcctataaggatattaacgttcctattttagcacttttgtaatttttttgcaattttgtaattttctaaacctttacgtttgtaggcgcttcctaaagcattatttgaaaaatataagcgttttattttaagaaaagtaaatcaatcgctaaaatgttacgttttagttatctttttgtaattttgttgctgtattgtaaacattcgtttttaaagcactcccatcataagaaaacgttgtctacttgcgggaatttcatttttaggctaaactaaggctatgagaatacaacaattacactatatcgttaaaatagtagaaacagggagcatgaacgaggctgctaagcagctttttatcactcaaccaagcctttcaaatgctgtacgagatttggagcgtgaaatggggattgaaatttttattcgtaacccaaaaggcattaccttgactaaggatggcgttgagtttctttcttatgctcgccaaattttagaacaaacagctcttttagaggaacgttataagagcaaaaatacaaaccgagaactgtttagcgtatcttcacagcactatgctttcgttgtcaatgcttttgtttcgcttttggaaggaacagatatgtcacgttatgagctcttccttcgtgaaacacgaacgtatgaaatcattgatgatgttaagaattttcgttcagaaattggcgttttatttttgaatagttataaccacgatgttttgactaagatgttcgatgataatcatctaacctatacgagtctttttagaacgcgtccgcatatctttgtcagcaaaaacaatcctcttgcaagcaaaaaactggtaacgatggaagatttggaagaatttccttaccttagctacgatcaagggattcataattccttctacttctctgaagaaattttttcacaaattccccataagaaatcgattgtcgttagtgaccgcgcgacacttttcaatctcttgattgggctcgacggttatacaatcgctacaggtattttaaatagcaatctaaatggtgataatattgtttctattccacttgatgttgaagatatgattgacattgtctatattcgccacgaaaaagctaacctttcaaaaatgggcgaacgatttattgaatatctccttgaagaagttaaatttgataactaaaaactcttggacattgtccaagagtttttatgttctatccatttctcttcaactcacttttgataatgtcattaacttggtcgaaatagaatttttctttgttatatttgacacctacataggtagcaagggcaatgattttatctagaaaggcttgggatgagaaatttgttgttcggtgtagttcttcttcgtcaaaaggcttgatgaggtgggctaagggattccgaacggatttttcaaaattacgaagttcactgattaactgtttaatttcctgaggaagttgtccgtactgtaggagttctgccaaagcttttgaagtcactttgccatcacgacgaatctcaaggtatctatgaaaaatagcatagtcgctctgcttcatttttgtaaacagccaagtatcatactggtcgtttttagcatcgtggatatagttttccaaatttggaatttcgcgtttggcaagacgttgaaagagcctatatagaattggactaacagagcggacaaaatcaatgatattgccatttttcaccttagcttccaaatccataatataatttgctaattgttcttcctcatacgcattggtaatgagtgaaacgccataattggctaaaattacttgattttctgctggatgtgaaaaagcaaagtcaacgttaagttccctacgctcttttaacatttctaaaagataacggctttgcgctggaaaatcactgtgctgctctgctattttccaagcgtgattataagcatagacatccaaaaggatgtctattgtttcatatatttcttgcattaatctgcaataagagtttcaagaccgactttcatcatgtctgtgaaagttgtttggcgttcttgagcggttgtgtcttcgtcagcaacaaggctatcagaaattgtcatgataccgagtgcttgaacgccgtgttttgctgcgagatagtaaagtgcagcggcttccatctcaacagctttcacaccaagttgcccgagtttgacattattttcagcaaaatctgaataaaaagcatcaacagataacacgctgccaacgtgagttgtcattccaaggtcttgcgcaatatggtaggctttgtcaagcaaggtgaaatcagcaatttgtggaaaatcatattgtggccattcatttttaatcatgcttgatgttgttgctgctgcttgtgccaaaacaagttcgcgaacgtgaacatctttattaagtgagccagctgttccgacacggattaattttttaacgccgtaagattggattaattcagtcgcgtagatagagattgatggcattcccataccagttcccataacgctgacacgttcgcctttataagttcctgtaaaaccaagcataccacggacattgttaaaacatacggcatcttctaaaaagttttctgcgataaatttagcacggagtgggtctcctggaagtaaaattttatctgcgatttcgccttgtttggcttcgatatggattgacataatatttcctttcaatgtgttcaataatagtttttgtagcaaaggctacgatgactgcaagaagcaaaattggaagagctgtgaaagattgtcccgtaaacgacacaaccaaaccaacagctgttaacggagcgttcatggtaatggctaaaaagatacttgagccaattaacatagctgaagttagtgatagttctgggacgaccaattgatacagcactgctaccaagaatcctaggacagcacctattgaaaatgacggtgtcagagtgcctccgtaggcaccatttttcagcgtcagcaaaacaagtacggctttaataaccacacaagctaaggcataccacacacccatcccatcaaaaacagcttgtgccaaagctccgccatttcccaaaatctctggaaaataaagagaacagcttgcgagaagcaaaaaagttaaggggagtttccacaaaatgcttttagtcgtcactttgctggcttgagctttttgggtgaggtggcgaaatagctgcgctaagggggtgataaggatggctagaaggattgtaagaccacatgttttagcatcgagcacgacttgtcctgaatgataaagtggtgtatctgaaataaccgttcccgcaataagactagctagaatcgcggtgcctgaaactgaaataaggttcaaaaatgacagccctaatccaagtgtttcaaaagcaaaaaagatactggcaatcggtacttgataaacagctgccaaccctgctgatgccccacaaacaatagcaagccttcggtcttttaaggtcaatgtcattcgatcagaaatacgacctgcccctaaagctcccagttctcgtggcgcaccttctttaccaataggtgaaccagctccgactgaagccacttgaagaaaaatatgtatcaagtgtatccaaagtatcggacgtttgctatcaccagtagcttttagctgtgatttgattgaaatgatttgacgatttttatcttgcaaaacaaaccaaataaacgctgaaataataccagctaataagatgataataaattgtaggtttgtgacaggttgcgcgcctgtactttccccatgaccaaaaatcatccattcaaccaattctaataagtcatgaagtaaaataccgcctactcctgctactagactagtcaaaaggagggtagcactaaaacgtaagcaataagctttggagttaaatcttttattttgtgaaagcatctaaaaattgctctaaaatatgattcatttctgaataatcgtaagctagcatttcatttgctgcttgaaggtatgagtgtgtcttaacttgttcatcataatcaacttcttctgccaaaagtgcctcaatcaatggttttgaaaactctaaatggcattggaaagcatagtgtttatcactatatttgacaatttgtcgtgggcaaccttgactagttgcaagaattttggcttgtggtgtcaaaccaggcatatcgctatgccagtgcccaacaattgcagatgttccaatatgcgaaagattacaatttgctaaaccagcttctgttaatgtgattggataatttccaatttctttttctgggcttctttcaacagatgctccgtaggcttcacctagcaattgagctcctaaacaaataccaagaactcgtttatcttgtgaaatagcttctttgataagcgagatttcagcttgtgcatcaaaatgaggacattctgctactgttgttcgtgggctttgtggtccacccataacaattagtaggtcaataccagaactgtcttttggcaatttttcgccttggtaaagttttgttattgtcacatcatgaccacgtttaatagcccaatcatagtaagcacctggtgcttcaaaagcttcgtgaacaataaaatgaattcgcataacacatctctttctgatttagtatgataataccaagttttaatattgacttacaattctgccaaaacagccttaactagggttttaaaatcctctttgatttgttgtgtaacagcaacaacttcttcatgattaagtgaactttggaaacctgcggcatggtttgtgatggctgaaattcctaaaactttcaaacctgaatgagcagcaacgatgacttctggaactgttgacataccaaccgcatcagctccaagagtttggaaggcacgaatttcggcaggtgtttcgtaacatggtccagaaacaccaagataaacaccttcatcaagtttgataccgattttttcagcgactttgtgagcagtatcacgatactcagccgtataagcatctgacatatctgggaaacgtggtccaaagtcatcaagattcgcaccaatcaatgggtttttccctgtcatattaatatggtctgaaattgccattaatgttcctggaccaaagccaattccgccagctgcatttgtcacaataagtcctttacaaccaagagctttcatgacacgaactgggaaagtcactaattccattggatttccttcgtaaaaatgaaaacgtccttgaagagcaatgactttgtgtccaccaaggtcaccataaaccaattgtccagcgtgtcctgctactgttgattttccccaattaggaattttttcatagggaattacaacagcattttcaatttcttcggcaagttcgccaagacctgaccctaaaattaagccaaattcaggagcgtcacaactttgtgataccaagaactgacgagcttcttcaattttttcaataattgttgtcatatgcacctcttatactaatttttctaggaaagattgaccaatcatggctgtctcaacaccaaagttttcagcgattgttgctgaaatatcagcaaaatgtccgactggtaagacaccatttcctttaaatgatgggctgtaagccaataatggaatgtattcacgtgtgtggtctgttcctgtgtaagttggatcattaccgtggtctgctgtgattaaaagaaggtcatctgatttcatattttccatgatttcaggcaaacgattgtcaaattcttctagacaatcacggtaacctgcggcattacgacggtgaccatacatggcatcaaaatcaacaaggtttgtaaatgataatccttttgtaaattctggcaattgcaaggtcttaatcaaggtatcaacaccgtgcatatttgatttattgtgccccatgtcgtttgtaatacctgaaccattgaaaatatcattgatttttccgacaccgtacgtcggaatacctgcgtcagctaatttattaagcactgttggtgcaaatggtgataaagcatagtcacgacggttagctgtacgtgtgaaattaccaggttcaccaacatatggacgagcaatgattcgaccaagcaaacttggacgttctaatgtaatagaacgagcaaattcacagattttataaagttcgtcaagtggaataatatcttcgtgtgctgcgatttgaagtactgggtcagctgaagtgtaaacaatcaattcacctgtcttcatttgacgttcaccaaagtcagcgataacttgtgttcctgaataaggtttgttggcttcacgaatgattttacgccctgaaaactcttcgatttttgttaaaatttcttctgggaatccttcaaagaaagtatcaaaaggctctgtaatgttaagccccataatttcccagtgacctgtcatggtatcttttccacgtgatacttcttctaattttgtcgcatagccacttggttgcgcttctgctggtactgtttttagaggtgtttcacgaggaatatttccaagaccaattttcgccatatttggaacagttaatccgactgtttttgaaatatgaccaagggtatctgaagcaccgtctggcacaccagcattgacaaaattgttagcatctggtgccgcaccaattccgacagaatctaaaactacaaggtgaatacgattaaatgttgacataattttttcctaatctagggtggttacggttggcacccaaaacctcctaatctcttaatatcctaataagtcaagtgattagaaataataattaatcaatataacatagtaaacaggagaagattcagttatggtaactgttaatttcctcctgctgaaatcattatttagcttctaaaatgttgacaccgtctttacctgcaacgataactttattgaccataccgttgaagagaccgtgttcaacaacgccgaccatggctttcaattctttgccaagttcgacaggattttcaataacgccaaggtcaaggtcgatgatataatttttcatatcagtcacaaagcgttcgccgtttgccatgcgatatgatggtttgtaaccttttttctcaaactcacggaaaatacggtctgcaccatattgaaccacttcgactggcaatttgaaggcaccgagtttatcgaccatttttgattcgtcaacaacccagatatattctttggttggtgtggcaacgattttttccataagaagggcgccaccaccgcctttgataccgttgaagttagtgtcaacttcatctgcaccatcaacggtaacatcgataacatcaatgtcatcaacagctttcaaaggaatcccaagaccttctgcctgtgcagttgtttggcttgaagttgttacgccgacaactttgagtccttcttctttcatgcggcgaccaatttcttcaacaaaaaagtatgctgttgagcctgttccaagtccgacaaccataccatctttgacgtactgagcggctgtgacaccagccatttttttgagtttttccatagctacctcaccattttatgtattattgtcaataattcctatttccaaataactattatatcatgatttagggtgtttttgccacaatgattttaatcggacttaattgttttggtgttttagtgtttctggtaaattctttagctgattttatcagaaattattgcaatggcactcgtctattgctagaaaaaatgttttgcgttacaattaactaagattattttcaaagaataactttgacatatagataggaagaatagtaatgattacaaatgaatttgatacgattgctgcgatttctacaccgcttggtgagggtgcaatcgggattgtaagactttctggaacggaagcgttagctattgcgcaaaaagtctatcgtggtaaagaccttaacaaggttgcttcacatacgattaattacggtcacattgttgaccctaatactgatgaagtgcttgatgaggttatggtgtctgtgatgcttgcgccaaaaacctttacctgcgagaatgtcgtggagattaatacgcacggtgatgttgccgtgacaaatgaaattttgcaacttgtcttgcgccaaggggctcgtcttgctgaacctggtgaatttaccaaacgtgctttcttgaatggtcgtgttgacttgacacaagcggaagccgttatggatattatccgtgcgaaaacagacaaagccatgaatattgcggtaaaacaacttgatgggtcattgtcacaattaatcaatgacacgcgccaagaaattctaaataccttagctcaagtcgaggtcaatatcgactaccctgaatatgatgacgtggaagaaatgacgacggctttgattcgcgaaaaaacacaagaattccaagaacttttggaaaatctattacgtactgcaaaacgtggcaaaattctgcgcgaaggcttatctactgctatcatcggtcgtccaaatgttggtaaatcaagtttgcttaacaatctgttgcgcgaagataaggcgatcgttactgatattgaaggaacaacccgtgatgtgattgaagaatatgtcaatatcaaaggtgtgcctttgaaactggttgatacagctggtatccgtgaaacagatgatgtagttgaaaaaatcggtgtggaacgttcgaaaaaagcccttgaggaagctgaccttgttctccttgtgctcaatagttctgaacctttgactgaccaagaccgtgcactcttggaacttagcaaagatagtaaccgcattattcttcttaataaaacggatttaccagaaaaaatcgaagctgaccagttgccagatgatgtcattcgcatttccgttcttaaaaatcaaaatatcgacgtgattgaagaacgtattaaccaacttttctttgataatgctggtattgttgaaaaagatgcaacttatctttcaaatgctcgccatatttcattgattgaaaaagcggtgcaaagtttgcaagccgtcaatgaagggcttgaactaggaatgcctgttgatcttcttcaaattgatttaacacgttgctgggaaattctcggtgaaatcacaggtgatgcagcacctgatgaattaatcacaaaactctttagccaattctgtcttgggaaataatcttcccttataaataatacaaaaagatgctgagtatttcagcatcttttgtgtgtacacacacctcatttcagccgttctaaggcgttcatatctataatacagagtgttttaccttgttttgcaatgatattttctctttttaattcactcatcaagcgagctatggtcacttcgtgaacttgcaaataattaccgatttctgtgtaagtaaaaaagtcgtctaatacataagttccagtttcatcttggctcgcatgctgtgtgataaaacggtacaaattaacctttgtagaatcctcaccactatcacgaattttctccataatagtcacataatctgctaaaaccgtttgaatgataaggtctttcaccaacgactctgctaattttgccatgaaagtctcaacagtcaatcgataaatgacacaggcagtctttgctgtcaaatcaaccgtcatgtcattttcataccctagataaaatcgtgttaataatggaacgatatttaaaaaaccaggctgtgaaaaatattggtaaataatcgtttgtccttgaggcgttatagaactcaaggaaacaattcctgattctagcaaataaacatgggttatcttttcttggcaaaccgttgtattaatcaaagcatttttaggcacttcaaatcgtgtgcctaaggcataaaattcttgtaaaatcttttctttactaattcttatcacctcactacttaacatttgttatggtaacagcgttttctttagtgtaccatagagataatttgagataaagtaataacctaattttcatttattggttaagaaaaatttaggacaaatttttaaaaagggagaatattatgccaagaaaaaaatggttctttacaagctctgctgttttattatgctctgctatgttactaacggcttgctcgtcaagttctaactctagtacctctagctccagctcacaaaacactaccgcttctacatctagtctttcttctggtgaggtctcaacgacacttgataaggtagataactcaaaatggcagtacaatgctgatgataatgtttattatcaaatcggcatttcttatgcagctaatcctacggacgctgaacagcaaacgttatcgatttttgtgcctggtgattacatgacagcgattgataatggtgacggaacctatacttgtgagataaatacctcagcaacagtcggaaattatacttctgaaacggctcctatcgtgattccaattaatacacctggttattcagctatgtctgcacttacagaatatactagtgatgctactgattatacatcacaaggaatgatttacgtatctgcaggattgcgtggacgtgattctggtgctccaagtggtgttacagacgctaaagcagcgattcgttatttacgttataaccaaggcaatatttcaggaaatacagattctatctttgtttttggaatgtctggtggcggtgcacaatctgctattatcggttcttctggagatagttctttgtacgacgattaccttacagaaatcggtgctgtcgaaggtgtctctgacagcgttgctggtgttatggcttggtgtccaatcactaaccttgataccgcaaatgaagcttatgaatggaacatgggatcgacacgttctgatttgagcgatgaagaacaaactatttcagatggcttagctactgcttttgcgaaatatattaataaacttggacttcaagatgaagatggcaacaagctcaccttgaagaaatctgatgacggcatttatcaagcaggttcctactacaattatctcaaatcagtcattgaggattcgcttaacacatttttagctaatacgacattcccatatgatgccagctcatcttctcaaggcggcttaggcgacggagatatgccgactggcgaagccccaaccgatcttgatactactgatgatacaacatcaattgaggatgttgatgatatcaatcgtacgtcatcttcttcaatcacaattgatttatctggaacttatgaaacagctgctgattatattgcggcgctcaacgctgattcaacatgggtcacttatgacgaggataccaatactgctagtatctctagcattgctgattttgtcaaatacatgaaatcatcaactaagtctctgggtgcctttgatgcccttgatttatcacaaggcgaaaatcaacttttcggctatggtgacggtaacagcgttcattgggactcaaccttgggagatttggtcaaaggaacagattacgaagaagcctttactaccgaccttgctaaaacagatagcttaggaaatgatttaaccacacgtatcaatatgtacacaccattgtactatctaactgattattatggtggtgaaaattcttcaaatgttgctagttattggcgaattcgtacaggacttagtcaaggcgatacagctttaactactgaggttaatttggcacttgcccttgaaaattacggtgttaaagaccttgattttgcaacggtttggggtgaacaacataccgaagccgaaatcagcggtgattcaacaagcaacttcattgattgggttaatcaaagcttagctgacaactcataattaataaaaaaagcataagaataccttttctgtttagaaaatactttcttatgcttttatttttaatgaggtattatattatctttcaagaatttctttgacatgtttttgcaaatctggaataacttcttttgcaaaccaaggatttcttgcttgccagaggttattgcgaggtgagggatgtaccaaagggaaaaattctggtaaataggcgcgataatgttttaccgtttctgtcaacgtggcagaagatttctgctgcaaataataacgctgtgcataggagccaaccaaaatatgtaattcaatatttggtgcgaaagccaaggttcgtttgtgccacttttcagcaaagccctttcgtggcggcaaatcacctgattttcccgttcccggaaaataataatccattggtacaaccgcaaaaagcccagaatcgtaaaatatttctcggtcaacgcccagccattttcgcaaattatcaccacttggatcattccaatacaaacccgactcttgcgcacgaatgccaggagcttgtccgacaatattaatccgagccgtttttggaacagtaaaaagtggctttatgccctgttgagtgtaggtcgcattttgctcatctgccataatgtccgcaattaattgttcaatggtatccatttctcctcccttctacttcttcttcaaagctttcaaatataaagaaagagattcttacaagttgtaaaaatctcctcttgtcattgtcaaaggttatttaatcaattcgtaaagtgcttcggcgtagattgctgcagcacggtaaaggtcttcaacgtcggcaaattcatttgcttggtgcattgtattgacataatctgggaacattgcaccgaaagcaacaccacgtttaagaaggcgtccaaatgtaccaccaccgataacttgttcgtaacctttcaagcctgtttgtttttcgtaaacagaaagaagtgttgcaaccaatgggtcatcagctggaacatagtgtggtgtgtgttcgtgatctgaaagtgttacttttgtcacaccgttaagtttttcaagttcagctttgatagtttgcgcatctgtaccttgtgggtaacggaagttaagagtgattgtattgtcatctgagtcgcggtcaaatttgaaaacaccagcgttcatgctaagagcgcccattttttcatcagtataggcaacaccaaggtttttacctgcaaaatcaccgtgaagaacgtttgctgctgtttcaagataagctttagcagctccttcaaaagcaaattggttaaggaatttagcaaggtatgttgcaccgttgataccaagttctggtgttgaaccgtgagctgattttccgacaactgtcaaacggaaagcatcgccttcttgagtcagttcagcggtcaagttttcagctgttgtgtatgctgttaatttttcttgaagttcagccaaagtgctgtcagctgtgaagatagctgttgctgattctggcaccatgttatcacgaagtccagcatcgaaactattcaatgtgaaggcaccgttattgtcacctgcaaagtgtaggaattctgtgatatttcctttttcaccattgataattgggaattcagcatctggagagaaaccaaaatcagggtctttcaagccattgtgagcaaaataatattccatatcgccccagcctgattcttcatcagtaccaacgatgaaacgaacttttttagatactggcaaaccaagttctttgatgatttttagggcatagtaacatgccattgttggacctttatcatcagatgacccacgcgcataaaggcgtccatctttgataactggttcataagggtcagtatcccaaccgctacctgcaggcacaacgtctaagtgagcaaagattccgagaacttcgtcaccttcaccaaattcaaaatcaccagcatagttatcaatgttacgtgttttgtaaccatcacgttcagccatagctaggaaatgttccaaagcttttactggaccaggtccaaatgggtgttctttgtcagctttgctgtcatcacgttctgagttgatacgcaaaagagcaaagaggtcttccatcatggcatctttacgtttttcaacttctgctttaaaatctactgtcattcttataactcctccataaaggtagcttttctcaaaaaagaaaagctatcttgttttatctttgaattcaccaaaaatcggtaaactcatgttactgtatttgtcaaactcagcctagcaaataaaccaagtttggtgcatgaaattaaagtcggtacgcttaacgacgttcgataatttcgtcaacaggcaaacgataacttggttcaggcttattatcgctataaccaacagtgattaagagctctggacgaaaacgtttatcaatttctagaatatcattggttgatgacttatcaaaaccaagaataatatttgatgaaatatcttggtcagtcaaagccaaaacaagattcatggcaacaattccagcgttaagggcaaggtattcgcctttgcgtttgtcgtcaaattctgcaaaacgagcaggtaaggtttccatgtagtaacctaacatatcattactcaatgatttgacaccaatacgagcaattttgcgagaacgttgaaccaaatctgtatcggtaaaaatcgctacaacgtactgtgcttgctccacttgctttttattaatctctgggagatgttcagcaagttcggcttttttatcttctaccacaacaaatttccaaggttggatattattagcacttggagctaatgtagcgatttcaatggctgttcgtaaatccttataatcaacaggtttgtcattgaaagttttgacggcatggcgctttttgtttaattctagaaacttcataagcgaacctccttctaaaatattctctgctcctctattctaacattttttgaaagagttcacagctttttttagtagttttgggaaagaaatgtaacatgaaacaagattttcgtaaaataaaaagactggatgtgtaattccagtcctaaaattattatactttttttatcactcttaatttctttagccaagcgtatcctgctgttgctagccatgtgagggcgttagcaatcagcaaagccttgaaccagacgccaatatggtaagtgatttttaatgtgttttttccgattttttgtgtcacagttggtgttccaattcctgacaaggaataatcggtacgacttagtttcttaccattgagtgttagctcggtgtctttgtacttggcgattggaatgttaaccttaccactattgtcagcagtccatgtgaagataagagcgttgccatcttgtgatttgtcaaaagcatctgtatgaccgatgacaaattcttcataaagaacgtatttgttgtccttgtttgatttttcggcgggaagataatctggtgttgatttcgagattaaatctaacagctcatacaaatctgaactgtgaaagctagctcgaacttcctcagaatttccccaaacaaaggtatgttttttagttttgatggggtgtttagcagtatagtattcagcaatcttttcttgttgcagatgtgttaactgagcaaggctgaaaagattaatcaaaatcgctccgactgtcactaatttggaccatttgacgtcaaaataacgctctaaaactaacgctactgctaacaataataacaccgtagcaggcacaaaaaagcgaaatgggaattgaattaaattgaccaaagaaaggtttaatttgttaatactgtaccaagggaaaatgctacttgacagaacgagaaagaagaaaaatgctcccgttgtgactcgtaatagtgtatcaaaatggcgccaatgtctgaatgaaaaatacaattgatacagcaccaaaagtagcaaaggtaacggtgttatcagccattgaatgctacgttgattcactgtcataatatataattttgaattgataaatggttcaaccaaattattattacgcccgacgtcaataagcgcagcccagacattcgttgtcaataaaagagcaagtaaaacagcttgtattcctttgatgagaatggttttcttttctttagatttgataaaaccgtacaaataaaacggcaaataagaaacaatgagcaagaaacaacttagcatatggacttgcatcatcaaagcgacagcaacggctaagcgtagcacgcctacttttttagttttcacaaaatcaatcgctggaatcatgcaccacggcataaaagcagctccccaacttgaaaagccttgcctaaatgtccaatattgaacagaaaaagtcatcatgtaaaaaatggcaatggctagagaaattttaggcttgacagctaccctgcgtatcaatcgatacattgaaaagcctgcaatcacactcaacaaaaagcgtgataccaactgatacgtgtaccaattgcgactgattagaaccagcaaaccttgaaaataggcaaaatagggaccgtataacgcattaacaatccgccctgagctataaaagccatacaaagatataaaataactgaaattaccagtcttaatctgcatagccgtttcataaaaacgattgtagtgaaagagaaaatcactaccaacaataacaccttttgatatgatttgtggaagaatcagtaaaaaagcaaccagcattatcataaggcttggtagccaaaagcgcttttctcgcagatgagaaaggctcttcttaaaattcttaaacatgcttatctccttaaaaaatccctatccatgttagcacagtttaaaaaagattacaaacagaaacagaaaactttcatgaaattttcttatttatattcaagagtacctttcgtttcttgcaaaaattatcccaaaatctgatatcctgcttcttctaatactcggagtgcgctttgaaaatccgttgttttcgttaaaatgtaatccgtgttataagtcgaaatggcaaagataccaatattattttctgctaaaagacttgaaatttttgataaaatgccaatcaaagaaaagtctaaaacaccctcgattcgaaaagctgaccaagtcttatcaactgtcaaagcattttcagggacaagtgcaatcggacaaacaagtgatttttcgtcatctgttgccccagtaaaaacaaatggattttccagattgacttgtgaataatcctcaactttgcaaacagcaaattcttcagtaatcggtttaatggttagcattgacagcttcctcctcatttaatttttctttaatcgcagttgcgacatttcgtggaataccacagttcacaatatcgtctatatcagccttttgaatattgggtaggctcttaaagtgcttcatgagtaattgcttgcgctttggtcccaatccagcaatgccatcaagttttgatgagaatgaatttttactacgcacttgacggtggaaggtaatagcaaaacggtgcacctcatcttggatacgttgtaacaagaaaaattcttcggaatttcgtggtaattcaacaacttctaaagggtcaccaaacaataattcgtgcgtttggtgtttatcatttttttgcagaccagcaattggaatatcaagaccgagcttgttttcaataacatcacgcgccacattgacctgaccttgaccaccatcgatgataatcaaatctggtggcactaagccatctttcatcacgcggctataacggcgatagatgacctcgcgcatgctggcataatcatctggtccgacaaccgttttaatcttgaattttcgataatctttcttacttggttttccatttacaaagaccaccatagcagcgacagggcttgttccttgaatatttgagttatcaaaggcttcaatacgaacaggctttggaatgttaagcaattcgccgatattttcaacagcaccataagttttcttaacatctttttcaagcaaatcaaatttttgttgcaaactcacacgtgcatttttaatagctagattaacaagctgctttttctcgccacgttggggcttgatgattttcgtatcaacaatcgccttgaccaattcttcatcaatttctttaggaatgaaaatttctttgggaataaagtgcttattgtcacggtaaaattgccccatgtaagtcaaaaaatcttcttctgggtcattgtaataaggaaacatattaacatcacgttgaatgagtttcccttggcgaacaaaaaatacttgcacacacatccagcctttgtcaacgtagtagccaaaaatatcacgatccatcatatcttggctcatcacgcgctgtttcgtgcgcaaagttgaaatagcttgcagtaaatcgcgatattctgccgcacgttcaaattccattaaatctgacgctttttgcattttatctttaagttggtcaacaattttattgtcttgaccgttaaggaaatttttcacatcgtgcgccatatcaacaaaataatcatggtcaacatgacaaatcgtatgtgctttacattgccctaaatggtaataaaaacaaactttattagcaggattggtacatttcttaaatggaaaaatgcggtctaacaggcgtttgatttccgttgctgctcccgaatcaggatagggtccaaaatacatggcaccgtcttttttgatttggcgggtaatcattaaacgtgggtactgctcattagttgtgattttgatgaaaggataggatttatcatctttgagcttgatattgtattttggcatattttcttgaatgagattgatttcaagaagcaacgcctcggtattggaacctgtgacaatatactcaaaatcctctatttctgaaaccaaaagttctgttttggtattatggctgccatgaaaatagctacgcacacgatttttcagattttttgccttaccaacataaataatcgtgccatttttatccttgtgtatatagcatcctgggctatctggcaatagctccagtttatgtttaatcagttcattcatgtctctattataacaaaatcgttttagcattgctgtggtaaaagttcctcttatttttgggatttggctttttttgataaaataaaggcaagattgattcattgaaagtaaaggagctattatgccagaacttcttgctaaacgtgtatccaactatgaacttttctttgacttggcttttgttttgggcattagtcaattgacctcatcaatccatttaagtcatgttggtgttcaagaaattttttcatttattatatctaacattattttgctgaatctttggatgaccgaagtgttttactacaataaatacggtgattcgaggcgaattgatattttctctgttattgcgctgatgtttgttgttggaaatcttgctttgacatttgatatgaatatggcgcatctttacgctgggcatccaactgtcgttatctttaattggcttctcatactagcttatgccattattgcgctacaatattttctcaaagggcgtgttttaggatttaacagagacataagatttagcattgttgcttgtgccatttatgggatttctttgttgccttttgcattaggattattgggagctaatatttggacggtgttaatttacctcatccccaatatttttccagttcttacaaggcgctatcacgattcatcacgcattaattttccgcatgctgttgagcgagctcagttggtgacaattttaaccttgggtgaaactgtcattgccattatcagtacctatccgctgacagaatctctttatcaaggtgccctattatttgctggaatgtctttcatgtttatttcctacatgacacaaactttcttggcaatagaccatcatcgtcaagtagcaggttcattgctgttctatgctcatattccgatttttatcggtattaatattttcaccgttgggatagaatttttagctgattctcatcatgctaaccttggatttgctctctttctttttggttttctcagtttttatgcaggtgttgtgacaacaacgcattataatcaaagcatttatcaacttcatttgaaaacgtatcttaaaatcggattgcttttgggaattggtgcttttatcatgtcccttgttagacatcatatcctactactgtcgctcgttctttgtgcgacaacatgggcatacaatcgttactatctgacagttcgtcgaagaaaacgtgagtatcacaacattccacatcctgacccaaggaaaaatctacgtgatttttcataaacgttatttaacaataagacttttacagcatagccaaaaaccgcaagctaaattagtttgcggttttctattttaaatataaataaaaggagagcgagttaattaatcatttggaacgaaaacaaggtgttcgttgacaaaggcatcaaagccgagttcgcttaattcgcgaccgtaacctgaatttttaatgcctccaaatgggatttctgggtgtgatgtccaaccagaattgataaatgacatccctgtctcaatcttggcagccacttctttggcatgatcaagatttcttgaaaagacggtaccaccaagaccatagctagaatcattggcaagcgcgatagcttcttcttcagtatcaactttatagatagaagcaactggaccaaagatttcttgattgtagattggattttctttggtgatatttgtcaaaacagttggcatgacaaagtttcctgggtggtcaattggttcatcaccgtaaaccacagttgcaccattttccttagctaatttgatttgatcaagcacttcttcttttgcggctgctgatgacaacggtgctaaagttgtcgcttggtccattgggtcaccccatttggctgatttgaaatgtttgactaccatatcaacgaatttgtcatagttttcttgaccaacaacgacaaaacgttttgatgaggtacaaacttgaccagcattgtagagacgagcaaagaaaacggtcttatcaagcaaatcaaaatcggcatcttctaggataataaaggcgtcgttaccaccaagttccatagatgattttttcaaatttgctcccgcttctgccgcaatagaagcaccaccacgttcagaaccagtcaagcaaaccccaacaacacgtgggtctgcgatagccttggaaacttggtcataagaaaggaagagatttttgaatgcgccaactggtacacctgcttccaaaaccaaatcatcaaatgcttgtgctgatgctggacagattgaagcgtgtttcaaaatcatcggatttccaatcataaagtttggcgcaaagacacgcatgatttgatagaatgggaaattccatggttcaacggctaccaaaacacctgtcgcttgcttgatgtagtaagcatcaccattaatgttttcaagcggacgtggtttcaaaaattcttctgccttatcagcgtagtaatccgcaatttctgcacagagttccacttcgcctttagcttctgtgaagagttttcccatatcttttgtcatgacttcagcgtatttgtcaacgtcacgacgtagcagctcagcaattttatgcaattgaacttttcgctcatccaagccaccttcagcacgccactttttgtaaagcgcatgcccatttgccaaagcttcctctaacgcttcatccgttgcattgtcaaaagtcgcaagaacctcgtttgtataaggataagttgttttatatgccatcgtaccttttcctcctttatcgttgctaaatttcacgccttacaactgttaaccataagattaacggtctttgttcataaaatttaactaaggtatccaagttcattatagcacttcaggaaacggtttcaagtaaacgctatcgtttttcaaaaaagaaaaacaatgcttgaacattcacaaacattgtttctacatttttattaccaaatccctagaagatgctgcatccaaagactgacacaggtaatagctatccaacacgtagcccccactccaatagcttgtccaccagtcttaataagtttgataggattcgtgttaagaccaatagctcccattgccatgacaataaagaattttgagagtgtcttaagattatcgaaaataactgtatcaattcctaaaccactgacaattgtcgtaacaatcgaagccaataagaaataaaggacaaacattggaaaagcttttttcaattggaaagtcgtttgtttagctctgccattttttgaatcttgataggctttatagaatgacagccctaaagtaatcggaataatggccagtgtgcgcgttaatttcacaattgttgcaccgtctaaggtatttgacccgtgaacagcatcccaagctgtcgctgtcgccgtaacggatgacgtatcattgacagctgttcccgcaaaaagcgcaaaaccttggttagataggtgaagtaagtcccccaacgttggaaaaattaatgctgctaagatattgaagagaaagataaccgaaatactctttgcgacttcttcatcttttgctttgataaccggtgctgttgcggcaatggctgagccaccacaaatagatgacccaacaccaaccaagattgctatattactatccaattttagccatttttgcaataaaaacgctacaaccaacgagactgcaatggttgaaataataattggcaatgattgtgtcccaactttaaaaacttgtgttaagtttaaaccaaaacctaataaaacaaccgccgcttgtaaaatatattttgatgtaaaagcaataccatcagtggtttgggtgcaattattatgaaaattccccacaaccatcccaagtaaaattgcaaatactggcgctcctacaagtggaaataaatgccctaaaaaccaagctggcaaagccagaatcacacaaaacatgatgcccggtaattttttctcaattgtcatcataataaaaactccttttcacaaaatattataacttgggcaagtcataatgtaaaattatgatttattatgatataataacaaaaaataataggagattgttatgcttgattaccgtgtttttacctttatgaaagtctgcgaaacgcttaattttacccaagctgctaaagaattgcatatcacacaacccgctgtcaccaaacacattcaaactttggaaaatgattatcaaaccaaactctttactttctctggaaaacaatgtcaactcaccaaaagtggtaaagaattgcttgatttgctgacaacaataaacaatgacattcaacatttcaaatcacatctcaatcaagaccaaacaccaattaacttcggtgctactttgactatcggcgaatatgtgttaagcgattcgttagccatcattctttccgaacatcctaattttcaaattaaaatgctggttgataatacggaaacgttattaaaggacattgaccaaggaaaaattgattttgctttaattgaaggtttcttttccaaagaaaaatatgactttatgccctataaaaccgaaccctttattgccgttgcttccccaaaagctggacttacggataaaacctacacgctcgaagagttactagactatcctatcatcattcgcgaacaaggctctggaacacgtgaaatgcttgaagtgacactaaaagaagctaatctagctatcactgactttcatcacattaccgaaatcggtagtctcaatgcgatttgtcaattgattacgaataatcttggtattacttttgtctataaaagtgtggttcaaaaagaattagacagcggcaaactctttgaaattaagcttgatttaccaccaataagccatgattttacttttgtttggcgaaaaaatagtcattttaaaagtttatatcaagacattttcaaactctttctaacaaattaggacttgatttaaacgcttttttgacgtaaactatatagttatataaggcctacgttaatttagaaagggcaagtatgcaatctacattgaacattacagaacttttccaatatggtgagcgtgtgacgtttcaaaaaggcgataagctgacaaaatctgttgctggagaagtaaatggtgatatttatatcctatcatcaggtgtttgtgcactttcttctatttcttgcgacggcaaagaaacaacttatctctacttcaagaaacaacaatttgtcggatttacaccattgatgactgcttttaatctcaattattatgggaaaaagacgttttcaatcgttgctaagacaccttgtgtcgcttatcgtattccaaacagaaattttcaggatttacttgggtttccgtcggtagcaactttgatggttaacactttaactgaaaatcttgtctaccttatggaacattttcatagcagcaaaaatgagcctgctctagtccaatttagtcgctttcttcttgatcaagcagaaaaagatgcttctggtactctcgtgctcgacaccgtctttacatatcaagaaatcgcttgctatctcggcgtacatgctgtaacaatcgctcgaatggttaaagccttacgagatgaacagttaattgataaaattggacaccaaatccgcattatcaaccctgagcaaatggcaagattaatcactgaagaacgaaaaatcgattactaaaaatcagctgaaacacaatgttcagctgattttttgttaactctactgtgtcacgctgggtttgatttttatcattatcgtaataattcaagtaaaccttggtaatctttaaccacgtaggttggagtgactttggtatggttttctttgcgggctggattgtaccaaacggtatcaatgcctgcgttgttgccaccttggacatcggctaaaagattgtcaccaatcatcagcgcttcttgatgattgaattgggaaatagctcccgcaatgacatcataaaagcctttatctggcttttggtaaccgacttcatcagaaatgaaaacatgctcaaaataatctttaatcgttgaatttgccatgcgccctgtttgaattttggtaatgccattggttgctccaaaaatacggtagccttgctggctaagattatcaagcaacttatctgcaccaactaaagtctgcccttgttgactaagaaattcttggtaacgtttggcaaaagcatgcccatctacctcatgcccaaaattcgcaaatagtcgtgtaaaacgcgtgttgaccaactcttttttggtgattttcttaaggctcaaatcatcccacaactgacgattcatgggaatgtaaaaatccttataagcctgaatatctgacacacgcgcttcctgcaaaagctctgtcaacgccacatcctctgccgcattaaaatcaagcaaagtgtggtccaaatcgaataataagtaatggtaatctgctgtcatgaaaactcctttggcaaatattatagcatataaagcaacataatcaaaaaaagcccacttcaaattggttttaaagtgggcttcttcctacttcccttccaagcggtctttgagtttttcgacaaagagataggcggcggggcagaaaagggtgtttttaatggttaagtgattgatttggtagattttcttgcggtcggtgtgtggaaattcacggcaagctttgggacgaacgtcgtagattgtacaaaggttatcatcgcctaagaatgggcaaggcatagattggaaaactttgtcgtcgtcttcatcaacacgcaaatacgtttcttcaaagacagacaatttcatacgaaaaacttttgaaatgcgtgtgatgtcagcttctgtaaaaagcggtcctaagcttttgcaacagttggcacatttggtgcaatcaatctcgttaaacacttcagtgtggatttcttgagtgattttatcaagatttttgggtgcttttttcttgagtgtcgctaaaaatttgcggtgctctttttgtttttgttgagcaagttcatgataacgttcaatatcaatttctgtcattttgttactttctaatgtttcgatttcagtcagaaaatattatagcataaataaagtttccagtggagtgtttatccatgagcctaaaaagtgaattgtaatgtcaaagaaatcctcttttcagcggagctttaacaaagctgcacgttcttgttccttgattgcatttataaatcttgcaaattccgccttagcagctctgctattttgcatagaatcgtgaaaagtaaaggtcaactgttccagaaaaacgggagctgttcccttttcgtgataaatatttccttgaaagaaatagcgtcgtgtctttctatcaatggcaacaagggacgaacgccaacgtgctttgcgttgattatctggtttccaactgattttcaattgctgaccacgataataccagcccattaattgcaaatggattgttttctttttaatcggatctttgtaagcacaagtcaaagcataagcttggtccttcactactgaaaaaggatgaaaatcttgaattccttggtaatcttcgtaagacatcagcttttctgcttgggaaagattgtgaaaaatcgctgaatgtgcatcacgaaatgggtcgtaaacgtcactgctttcagttggttttccatgtaaaatctcatcaatctgagtttgagtgtaataggtcacatagtctttgaccaccttgctatcatttggcacttgtaaaatctgaatcgtctggcgtgcctttagtggaacggataaaatcccttgataaagtgtcgatttggtaaaacatttgagacgtttcaactcatgatcatatccaagttttgaacgattgaggacgtaaaatgcctcgtcgttatccaatttaaaaacaatgacaaattgaaggtgctttcgcttgtggtcaattctaaaaattggtgttgtaaattgagaatcatttttaaaaagttgcaaaaaatgaccagcttgcacaattcttttatgagtgatgtgagtcataaatttagtttagcatggttagataaaattgtcacggtagtcacatcaaaaacgcccaaaccgttttcggctgggcgttaagcgaaatgagattgttttgtgttttgattgtatgagtaaaatgtaattgtaaaagaatagtttaaagggcgttgtaatcgtcgtcgctaacggcttctagccaagtatttgacgtgttttcgccaggaacttccactgaaatatggctaaaccatgaatcttttttagcgccatgccaatgtttggtattggctggaatcacgataactttccctggttcaaggctaacagcttctttgccttcttcttgataccaaccttgacctgctgtacaaatcaaaatttgtccgccacctttatcagcattgtgaacatgccaatggttacgacaaccaggttcaaaagtgacattcgccaagaaaagcggcgaatctgtaccaaccaatgggttcaagaatgattgtccgtcaaaatattgcgcaaaagcgtcatttggttgtccttgtccgaatacattttctttgtcaaaagttgctttatctgtcatttgttatcctttcatatctttcttaatcttcgttccaaacttctttggcaaggttaaagactgcccagccttttggccaacctgcatagaaagccacgtgtgtaatgactgctgcaatttcttctttgctaacaccgttagctttcgcattttgcaaatggaattttagtgagctatctgtaatacctgatgccataagtgccacaactgtgatgatacagcgtgtttttaaatcaatatcgttattattccagttttcaccaaagagcacatcatcattaaaatgtgcaaattctggtgcaaattcacccaattggtcacgtcctgctgtttgtttaattgtcattggttttcctttcttaatagggtttatactgccattatacgcttctcgtttttaataacaaatacttatttgacatagtattttatgccttttaagcataatttaaatcttaaacgagctaatcattttaactgtttcagggtcagcatgtgagaagaattggctttcacccatatcaagtttcaaaatttctgccatgtcatcatctgttaaaacaaagtcaaagacatcaaaattttgttccatacgatttttatgaaccgttttaggaataacaataacatcacgttgaatcaagtaacgtagggcaacttgcgcagctgatttatgatatttttgtccaatcgcaacaagtgtttcattggtaaagaaatcattgcgcccttctgcaaatggtccccaagattcgatttgaacaccatattcgtccattgttttgcgagcatttaattgttgattgaaaacgtgcgtttcaacttggttaaccattggagtgacatccgcaaaaatagccaaatctgctacacggtctggtgcaaaattgctgataccgattgctttgattttaccagctttataatattcttccatggcacgataagcaccataataatcaccaaatggttgatgtaaaagcaccaaatcaatgtagtctgtttgaagtttcgctaaagaagcatccagagaagctttggctttttcatagccataattgctaatccaaattttagttgtgatgaaaaattcttcacgcgcaataccagacttgcggatagcatttccaacagcttcttcattcatataagcttgagcggtgtcaattgagcggtaaccaaccgaaatcgcatcactaaccacgcgctcacattcgtcaaggtctggcacttgatacacaccaaatcctaaaatcggcattttaacgccatttgataacgttttgtagtccatttgcttctcctttactcattttcgtcatcttcaaatagagcttgttcttttttgaggatgatgttttgataattttcaattttgtgattgagcctatcatgtgcactttgcaattcagcaatacgttctgccaatttatcacgttgttcttcaagcaaagtcatgcgtgcctcttcagttccgtcaccttcttccaccaaggccatgtattcaattaaagattcaacgctcatgcctgcttttctgaaacaacgaacaaattccaaagtggcgatgtcacgctctgaaaaatcacggactcctgatttattacgcgttactcgaggaagcaagccaattcgttcataatagcgaatggtatctgctgaaattcctgtctgttcgcttacttttttgatattcatacgtcatctcctttcttatttcactctcagtatataccttagagctaactccaagtcaagcaaaaaacgtcaaatttattgaaaaatcgtcgattttttaacgatacaagcctaagctggtgttaagataagtttctggttggtcaataatgtgttttacgagtgtcacgattgctttgcgagaaacgtcatgtccatagaaagtctcacctttttgcgtaatctgacatgtgctatcttgtccattgtcaaaccaccctgggcgcaaaatcgtgtaatcaagtcctgactgttcaacaatgtctgccgccttgcgatatggtttaagaatcggcgcaactacaccttttggttctcctgccacttccccataaatgcccattgatgagacaaagacaattctagccacaccaacacgtttcatactagcaacgatttctcttgccattttgggtaaatcacctgatagagccacaaaaacaatatcttggtcggctaaaaccttgtctaaatcattgccagatgttgctgacccattgatagctttttcattacttgccaaggctaagctttctgcacgacgtgagaaaagcgttacgttatagtcagctttatcttttaattcttcacgcaaactgcgtcctaatgaaccagttgcaccaataatcgctacatttgtcatcatatctgcctttctaatctagtaagtacttgcgctttgtttgatgattttccaatcaccgtcaatcttttcaaaatccattttaatttgcaggcgccaagtggctggtcctgctccccaaactcgtgctttaacacgactttgcccaacaagactggctgtattgtcagtgatataaatggcttttatggcatcttcttgccatgcataatagcgcatttcttcgttctcaatttgcgctagccattctttcacaggttgtacataacccgtcatatgaacgagaatcgagttaggtgttatcaattcagccaaggttttcgtgtcttttgcgaccatagcatcgttgacttggcgataacgattttttaggatttcttcaatcatttaatcttttccttctgccataccagtttcggtatttggatttaatggtccatagaaataagaagctgttgcgccaccgtcgataaggaaggttgagccagtaatgaactgcgcacgttcactcataagcaattcagcgacatctgccacttcatctgctgtcccaggacgtccagctggtgatttggcaaacatatttttgtagaaatcacctcgaataccattgaattcgtcaatagcaagtggcgtaacaataattcctggtgcaatatcgttaattctggcaccacgttctccccaacgaacggcttcgtacatggtacgtttttcattggcacgttttgccaattggtaagcatggaggctattttcaatcttattttcttgtaggaaatcaagcgacaataattcttccgttggtgtcatggcaagtgccaggtcttgttcagcagtcaaagcaggcatacggtgacctgattggctagaaatagtgacacctgcaccgccttttgcaatgacttttccaacttcttctagtaaaacagatgttccataaaggtcaacttttagcacggtttcaatcgaagcttgcgatggcgaaacacccgcaccattaaccaaatacttaatgtcaccaaaagtttgcgcataagcaatcatctctttaattgactgaggtgatgacaaatccatttcaaatgtcacgacatcaaaaccagcttctgttaaggtcttagcaattgctttggcattatcaatcgaacggtcacctaaaacaatttttttaccatatcccatgcgacgtgcaatcgccattgaaatttgcccagcacctgttactaacataacatcttttgtcatttatctttcctcctgattgtttttactttaacttatcggcagcttcattgacacaacgaagagcatttaaactacgtggataaccaatgaatggtaagacatttgaaataactgcgattagaaaagctttatcgttgccaattttcatatttgcagctgcgtggctagtcaattgtggctcaacaccaccttgagctgccaagaaacaaaatgttatcaactcacgttgcttataatcaagacctgtacgtgtgtaataatctccgaaacaattatcagctaaccaataattgatatgggtactttccttagcacctgattgccaaaaatcacgcatgccttcaccaaaaatatccacttgcgcttgtgtaccagcttcacgacgattgtcggttgttgtggttgcttgtccttcaagtggcaatgtaacgcctttttcttccaatactttattggttgcttttagaaatggaaagacacgtccaattcccaaataagccaccgcttgatagacaatttctttgatttcaactggtgtaacgccaaaatttagcgctgctggcacaatagcttgaaattcatcaatgccttggcaacctagtaacgtcgctaaaatcaccataaatcgtgtcttgtcatccaatgtcgcattcgggtgattaaccacttcatcaaaggcaaagttgtcaaatcgttcaatgaattcagggtcagttctcaaaaaatcagagacatatcctggaaacattttttcatgatattgtttcgcattttctgtaatagccatgctatttcctcctgcttttccgctgtcagttatgatgttgcttaacttctaacatctttatggctacattataaatccaagctatcggcttatcaattttaaaaaaaggcacttcggataagaaaaacttatctgaaatacctttttggttttagttttgctgaaaagctttggctagaagctctgccattgtttcgacgtaatagcctgagttatcttttttccaaaatgcgcacattcgacgtaaaatgggttttccttgcttgtatattgggcgacagctaagtgtcggtggaaggcttgctccctttccaaattcaagtggcaaataaccgcgattggcgacgactgacattttagcttctgtggcatttggtgcaaattgcatatcgcctgaaaagccgatgtaatcacggtaatatgcgcgctctgtttcttcttgctggctgtccgcaaccaaaatcaagggcttatcaagggaattttcaatagctaacacttcttctttggtatgcggattaaaagccgcaaatgcgacgtaaagtggcaaatcagtcaaaactaaattttcataatctgtcgaaaaagcacgtctctggtcattgatgaccaaatcgattttaccaaagcgtaagtcatcataaagttggtcatgcgtccctgttttgaccgttagcgccacatcaggaaattgactagcaaaactcgcaatcgcttcttggatttcactgccttcataggaatacaaataaccaacggacagttgcgcagcttgttgattggcaattgcttgtgtctcttggcaaagggcatcaaaatcagctaccagcgccagcgatttttcataaaaataacgccctgcttctgtcaactcaaagccacgatttttacgcgttaaaagtgtcacacccagttctgcctctaaactccgaatctgctgtgaaatagctgactgtgagataaaatgcgaatcggctgccttggtaaaagaattttcttcgacaactgattgaaaatatttgatttgttttagcaagctggcaacctccttcttagactgaaaagccatttttatttcaattttttagtattcaaatagctcaacaagctgttaaaatcaggaaaattaagggcaatacggtcctttcccagacttcccagtttactatgtccgacaaaagcttcaagaaataacttcgctgatttggcaaggagcaatttcttctccgttccaatggaataaaaggaagcaatgcttgttgccaatttcgcgccaaattctcggtcaatcgtcacatcgttaatgcttttgataccgcttgacatcaaggtgtcaaaaagggtatcaaagagaattttcaattcttggctggacaattcatccgtccattgtttaaacgttttttcaagattacggcttaaatcggttggctgttctgctaaaatcaactgccccgtctcagcatcaaattgccatgtcgtcaaagcgtgttgcatgattccggaagcctgactcttaaccacaacaggggcaatgtcattataaagcatgacaccaacgatagattcttcagggcgaatgacacgcacgcgctcacgaatcgcttgataacccgctcgctcaagccctttttcttgcaatcctggtgcgtcaagcatataaacttgcttgatttgcggacgccatttttccttaacatgagccgcagcatacaaagccaaatttccacccttagaatgtcctgataccgtgagaggcattggatgacttgctaaataacgttcaagataagtcaccgctgcacgatgagcaggaatttcacgaacataagctaatttaaaatcttctttccagccaatcaaggtatcatctgtcccacgaaagaccaattgataatggtcaatttcaggtaaactaaaaaccatggcagaaaattgtctctcgtattcggcatcaacatcattcacgtaagctgacaaacgcaaatcagcgaacctttctgatgaggctacatttttcagcaattcaacacgcgccttggttaccaaaaaactatgattgaataccttctcaccagcctcgtaaggcatcagaatgtcatgtaatgtcaattcttttgaaaaatcaagcgtattatccaaatcttcaaagcaaaaataccccagttcattcaaacaaagaatatccgcttcgttaaatggaaattgctcaaacgtttcatttttatgttttgctagataatcattaattgttgccatatcgtcctctttactctcttgaattttacaagcattttccaagagtgtcaagaaaaagccaaactaccaaattctctaaaaatgttgaatgactttcgacactccaaacgtccttaaaaccaaaaaaagcaaggagttatccttgcttgtatgcgttttgtttaggctagtacggcttgtttttgaatttcgcctaggaaataacgggcgattggaccaaccacgacaaaattatatggtaatgcgacaacaaaatttgttagccaagcttgtccataggctacaaggctgacaccttccaagcctaaattgaaaatgatgccatataatgacatacaagtgaccattcctagaaccatgcaaccagataccgcaaaaattttaacgtatttgctttttgaatcacgtgggataaggctaaaagcgacttttttagccagtggtccgataataagcatatctaaaataaaggcaacaacaaatcctggaaagaaaccaagaaaaacatggctccatgcaaaggcacctgcaacgtgcaagttccaaatactcattccaaagaccatcattccacacatcatacacgtaaatagcaaagcttctttaaaatttctaggcattttagttctccattcattaattaattattcattaaccaatcaacctaggtctgcgtacaaacaaaaagcccttgtaaggacaacgttttggaaaatcttttactgatttttccttcccatactcgactccagtttacagtcaacaagagctagtctagcataaaaaatttttcttcgtaagtcttttttagcaaaaaataaaaagtaaacgttttacacatttacttctcatttttaatcaataatctgttccatacgtgtttcttgtggtgtcatgccttgacgttcatagaagcgaacggctgatttgtttgcactccagacgtttaacgttaggttgtaacaaccaatttctttggcgtatttcaaagcaaactgatagagtttttcaccaattttttgtccgcgcgctgcttcgtccacacacaaatcatcaataaagagtgttttttgaggaacttttggtgcgctaacgtcttcaacaatagtaaacatatgcgcaagcacttttccgttgtcatcttcataaacgaaaatcggacgattatcatcagcaataagtgccgctaattcgtcttctgtgtatttgacacctttttcttgaaataaatcaggtcttgccacatggtgcacataaaggacttgttgtaaaaggtccatcaatgttggaatatcagcgattgtcgcacgtctaattgtcattttattgacctcccaatcttttcgtttttctattataacattttacctttttgttgcaacctataacttgccgtcccattctgcgtaaaattctgttaaaaaatcttctagaactttgtgacggtgctctgccatttttctagcataagccgtattcatcaactctttaagtttgagtaacttttcgtaaaaatgcatgattgccgtatcttgcccgttgcgataatcttctaaactaggattgtcacgtgctaccttacttgggtcatgaatcggacgtcccttgcttcccgaataaaccatacaccgcgctattccaattgcaccaatggcatctaaacggtctgcatcttgcacaatcttaccttccaaagttggcggaacactttgaccacttcctttgaatgacatggtcgtgataatttgaataatgtgctcaatagcttcttctgatagttcttgttgcattagccaagctttcagctctgtcaaagcttgctcgggattagcatttaacttatcatctgccatatcatgaagcaatgctgccaattcacaaataaactggtctgccccttctttttctgccaactcacgcgctgtatttctcacgcgcaccacatgccaccaatcatgcccactggtatctgtatgcaatttatcataaacaaacttttccgcattttgtaacatattattcttatcaatcatatgaatgattataacataaaagcaagaccagtagccttgcttaatgatgtcaactattttagtattccaatactcctgtccaagcggatgtgccacctgcgacattgacaacttgatagccttgttgagataagaaaactgctgcctgttcagaacgtgagccactttggcaaatgatatgataaaccttgtccttatcaagtgtttggtagcctgatacaaattcgcttaaaggtagattaaccgctgttggcacatgtcccatggcgtattctactttctcacgaacatcaagcaaatgcaacttctttttacttaatttttcttgtaattctctagctgtaattgttttaatcatgaacaatctcctctggtttgacagtactataaaggaaataagcaccatcaagattttgaatcttaaagccattttgcttcaaaatacgttctccaatgtaagaacgaagcccgctgtggcaactgataatgtattcttgattggcgtctaattctgctaaacgatcacgcaattcatcaagtggtatgttaatactatttgcaaaatgaccgcgtgaaacttcttctctcgtacgaacatcaagcaatatttttcctttggctaattcatctgataaagcataccattgaacgttttcactaatgccttccataatgttaagcgcagcatatcctgtcatatttactgggtctttagctgagccaaatggcggtgcgtaagtgaattccaattctggtaaatcagttaccgtcagacctgtttttatcgctgttgctagaatatcgacacgcttatcaacgcctttttgcccaacagcttgtgctccataaatagcgcccgttttctgattaaaaatcaatttcaaaacgatgtcgctagcattgggataataactagcatggtcttttgatgtcgtatgaacaacagcaacatcttcaaactgttggcgagctatgcgttcactcaagcctgttgaagcagctgccaaatcaaagacacgaacaatagctgttccaatacttcctttattttgacgagcgataccagcgatattatccgcaacttggcgaccttgacggtttgctgggctagctagagaaataagcgcatcttgaccagtgatttcttgcttgacaataatggcatctccaacagcgtaaatatctggattgctggtttgataatactcattaacaagaatccccccacgcataccaagtttaagacctgcttctttggctaaatttgattctggttgaaccccaactgacatgatagtaatatcagatagtagctcactaccatcttcaagaatgataacttttccattatccttgaaagctttggcagattgattagtgtaaaccgttatgccgtttcgtgtcaattcatccttaacaaaagctgccatttcttcatctaacggtggcaaaacatgcggtgccttttcaacgattgtcacttgcaagccttttttagccaaattttctgccatttcaagtccgataaacccagcaccaataacagtggcacgtttagctttggtgtcgtttaatgcattcagaatcttatccaagtcaggaatattgcgaagcacaaacacgttatcagcactatctagcccttccatttgaggaacaactggtttggcacctagtgacaaaatcagtttgtcgtatgattcttcatagactttatccgcatggcgaactgtgatggttttcttatccgtatcaactgccaccacttctgattctggtcgaacgtcaatagcaaatcgtgctttcaaacgttctggtgtctgtacgataagactttcacgctctgctatttccccagaaacgtgaaagggaagcccacagttggcaaatgaaacgtaaggtcctttgtcaaatacaatgatttcagcgtcctccattaaacggcgtaaacgagtcgctgctgacatcccacctgcgacaccaccaacaattaaaattttagtcatttatttcctccgataatttttctatgccaagccatcataccacctttaaccgaaatggcttcatagcctttttgttgtaataattttgcgccacgtttgctgcgagctccagaatgacaaataagataaattggcttttctttggtaccctgataggtattcaaacggtctaaaggatatgaccgagctcctttaatatgccccctagcgtattcttgagctgttcgaacgtctaataacacaatatctttatctaaaagtcgttgaagttccgtaacatcaatattttttatcgatgatgaaaatattttttttagaaaaataaccttgtctcctctctattgataaatacccctatgggtatatttcgataatatcacatcctacaatttactgtcaacgataatgtcttgggtttgacaaataataccccatatcggtataataacagtcaaaggagggctttatggcaacagataacaaagacattatcaatcgcttaaaacgtgctgaggggcaactgcgtgggattcaaaaaatgattgaggacgataaagaatgtatcgatatcgtgacacaattaactgctgttcgttctagcatcaaccgtaccatgggtatcgttattagcaacaaaatcaatcaaatcatcgaaaatccagttgaggataaagaaaaacaagaagaaaaattacaaaaagcattggaattgattatcaaaaaataggaattcgttactgctgcacagatttccatttatcattttcagattttttcatttttcttaatgctaattccttaaaaaggtgatatacttatgcttaggaaagcgattttattatgctaaggagaccatatgacaaaaaaagaaatggtgacctaccttctagattacctgattaaggaaaatccacaatttagagcaattgatgtccctagtgacttggctggtcaggaaacattattgcgtgctcttcttaatgttcgtccaccgatggcggtttcaagtagctttttggatatgcaaaacaactatctacaactcaaaaaagcagaacgtgtcgttgtttttttgaatcatctgcaacccattccgacagacgaccgcctttatgtttggaaaggtgatattacgcgtctcaaggtggatgccattgtcaatgctgctaatcgccgtatgcttggttgtttccaaccgcttcatgactgcgctgacaatgctattcatacctatgctggtgtgcaacttcgtctggattgctacaaactcatgcaagaacaaggtcatgacgaaccaactggaacggcaaaaattacgccagcttataacttgcctgccaaatttgtgcttcacaccgttagccctgctatcaacgaacatttgacgccaattgatgaagatttacttgctaaaagttatttatcttgtctaacgttggcagaaaaaaatcatcttgaatctgttgctctatcatctcttgcaacagatgatgaagttcattttattaatgaaaatgcggcaagaattgccattcaaaccgcaaaagactttttagaacacagccaatttgttaataaaattatctttaacgttgacgaggacgaggaattaaacctttatcagcaattacttaattaatcaaaaaacgccataaaggcgtttttgtttttaatctaaagctactgtatctaaaatatcttttccttcaatgcctaaatcaggaccaaagatgtcgtctagtgttttatcaaatggggttgttgagttagaggtgataggcttggctactggggctacactcgcattccaactagctgaagcacctgaattagcatccgtagatactggtgtactttcgttagctccagctggtttgagaatttcttcgtttggggcattcagtccgtttaccaaaccaacatacttcacaaaattttctaaacaagttcctaagaaattgattgttgcttcatttttcaaatgataatgactgtcaaaggcttctttagcatttccaaggagaaactcatttcctggtaaaaccatggcattaacacctggggaatcaagaatttgacgaaggtgtaactgtgcccgtgatgacccttgttgataataagaggctcctacaatcataactggtttgccatcaaagggatgaatttggtaggaaagccattcaatcgtgctttttaaagctgcacttgtggtgtgattatgttcaggtgtcgcgatgataacgccgtctgctgctgcaattttatgagccaaattttgaataacaggattatctgtttggtcatctgattggttaaaaagtggtacatctgtaatctctaaaatttctaaatcaaaaagctgccaaaacttataaccgatatactgcaacaagagacgattatgtgaaaaaggtgcattagaccctacgattccaacgattttcatgttaaaattctcctctcttactgctccaattcttcccatgaaaaagcttcaacttctttttggtgctgcgcatgtgtttctgtcagttgacttgtgattttgataaacactagaaaatctgtaaacaaggcttctaaacgtcttatttgctcagaatctttcaacgcaccgctttcatcaaatgcctgcaaagaatgtgccagatgatattccgagcttggcataatataagcacgtaattctggggcatctaagatttgacgaagctgtgcttgagcacgtgaagaacctagcgtgccataagatgctcctacaatcatgactggcttgtcaacaaatggatgttgccctaccgaaaaccattccagagcattttgcaaagccgctggaatagagtggtcatactctggcgtggcaatgataacaccgtccgctgctgcaatttttgcctctttttcttgaacactagtcggaatagaatgcatcaaccctttgttaaaaagtggaatatccttaatttccataagttcaatatcagctttatccgcaaaatgtttggcaatatagctcaacaattgacgattggttgacttgtcagaatttgttccaacaagggctattaatcttgtcatagtcgtctccttttaccttcttacttgaaaaaatcatcagcttaaaacaagtggcttttggcatggcaaacaaagtttttccgttttcaagccttatcaactaaatctcattagccgttgtgatttttataacaatttcattatacctgaaaacgctttttctagaacagaaaaaaactatctaaaaatatgactttagatagctttttaagttatttcaataactaatttagtcctcaaaatttggtaaacggctttcttgacggtattctcgtggagtcaaacctgtctgtgctttaaaattacgatgaaaattagaaacagctttatagcccagttcttgactaatttcatccaaacttttcgtcgtcagacgcagttgttctttggctaattctaattttatatgcgtttttagttcgttaaaggtcaccccaaaaagattttggcaaaggcgtgaaaaataattgggctggtaagaaaaatgagctgctgtctcctttaacgtgacggtttggatattttccgtcacatattgcataatcatgccagattgtgtttcttgactcgcatatttgacttgagcacttggaaattgtgaccctgatttggataccttattctcatggtcacgcaacaattcggtaaacaatagccctgctattttctgtttttgaaaatgaacatatttatcatcatcctgcgctagctgttctagctgctcaattgcatctaaataagcatgacaaattttagcggttaggtgggtaaatagaatataagccttgctcgatttgttttcattcattaaatcatggataagcggattatcccccactgtgtatcgattaagcggtgacggtaagtcaaattcaatcgaataaagccgtaataacaatgggttgcggtcatgagagtttaaatgaaatcccattaaactttgccccaccaaaacatcataaggctgcatcgtcatgtcacctttgggagtatttaccctaacttgtgacaaactttccaaaatatagagatgctttcgctctttctcttgcggtaacatcggctcattgagcatatattcctgacaattatatatcttttttagcatcattttcctcgtaaaagttattttaagtcatattataagatatttaaagggcttacaaacgtgatttttttcacttataattatagcacaaaaaacaaagcgaggaatttcatatggttaaagaatatactgttgatgtcgtggttgctggtgcaggcggagctggattgtctgccgctcatgctgctgctcaaaacggtcttagtgttctcgttcttgaaaaactagcacaagtcggtggcaatactaaaatttcttctggcttctttgcggttggaacggatgaacaaaaagcgcttggctatcaactaaccacgcaggaagctatcgaccaattgcaagagcataaccattacctttcaaatggggcacttttaaaaaatgtggttgagcacgctaaagaaactcttgaggaactcaaacagcttggtatggaaattcaactgaatcctgtggaaaatacaacacaatttgctcaccgtaataataaatatcgtggtggttcttaccatatgtatatggataaaaatcgtactttcccagccgttcaaaaatctattgaagctgaaggagcacaatttatctttggtgttaccatgaaagaattgctccaagacacttctggtcgtgttacaggtttaacagcagttgatgaaaatggagaagaaattattgtccatgctaaagctaacattatcacaactggtggttttggtgcggataaacgtcgtgtcgctaaagtcatgcgaacagttaatttgcgctctcttggcgttccgaattttggtgaaggtctgtcagccatggaaaatgcaggtgcggtaaatattgatggcgctgctctgattcatgccgcacaaatggcagaatccgttgtcagtcaagatactaaaggaaaacaattagctggctttaatgattctccattaacacaattactgttatctccacttctatgggttgacccaaacggttctcgttttacaaatgaggatgtggtttatgataccgtacaatggtcaaatgctgcttatggggtcggctcaaaatatttctatgtcatggataaagcaacgcttgacagctacaccaagcagccacaacttttaatttctaagtctggtcctggcgcttccgatgccaagggggatttcgttactcttgctgatgaggcagtccaacaaggaatcgcatttaaaggagataccattgaggaattagcccaaaatgcaggattcgatgttgccgcctttaagcagactatcgctgaatataataccgcaatccattcacaaaatgataaacaatttagcaaatcagttgattctttgaaatatgccgttgaaaacggaccttactatgcttttattggacaagttgtttacctaggcacggtcggtggcgttcgagttgacaaagatctccgtgtgcttgatgttcatatgaaagctattcctggtctttatactggtggtgccaatgctggtggttattatgcccctcgcaattacccagcttatgaaggactggcttcaggattctcatggacctctggtcgtttagctggtttggctgctgttaaagatattacagaaaataactaatttttaattaatcagacggaggttatccccatgtcacaaaaaacagtcaatgcttcttcttggcttttcaaagcctcactcttatctctatcacttttggcacagacggctccttctatttcaattgctaacacacagcttgcagagcaattcccaaatgtctcacaatcaacgattgaattgatttcaacattgccaaattttagcgttctggttttgattttatttacagaagctattggaaataaatttggaattaaacggactattttgtttggattatcactttacatcatcggtggtgttcttcctgcagttgtctctagttttccaatcattattgccgcacgtttattaatgggactagggattgggctatttaatccttattctgtcagtttgatgtatcaattttacgatggtcagcagttaaaaggaatgctcggtttgcaaaataccgcacaaaatctaggaaatgccgcttttggttttctcctttcagccttaattatcagcggttggcgaactgcctttactggtttctttgttggtcttattccattgattcttatttggctatttgtaaccattcctgatgataaaaaagctgatgatgtggaaatgcctaagaatagctttaaagatgctgtgagtggtcatattctcttacttgctcttcttttcatggttacttttgctatgtttctcatgatgacgatcaaaatggcagtgctcggacaagaaacaggattattctctccgtctgctgcgtcatcaattcttgctttacttggtttgtcttccatggtagcagcccttctttacgcaccagtttcaaaattaattggtaactttattttaccagttgcctatactggtattgcatttggtttctacttggtagccacagcgacaaacgttgctttggtaacaacaggcgttatcattgctggtttattctttggttgggtgttcccacaagcttttcttcgcgtggcacaagtcggtcctaaaaatggtggtaccttaaccacatcggtcattcttatgggaatcaatctcggtgctgcttttgccgcaccaatggtaaatgccattgctggtatctttgggcaaacaagtgcctcaggcacacttggattggttgcaattggttttgttatccttgcaattatcgaatacatttacaacttctttgaccgtaaagcgacttaaaatcagttttgaaaataaagctaagacaaagtgcttagctttatttgtttacgtatttctcagtgaatatttttaaaatttggagcttcctcataaatttttattctgacgcctttagagcgtttttttatccaatttaatcgtattttaggagatttttgtcatttattattaatattacataccaaactgtcatatgacattttagaaatggttaagtaatgctttataaaatgaaagggtattctataaagagaggaagttcttatttatgaacaaacgacatcttttaaatcgctctgctattggacaagcaaaagggcacgaagtgaaacgaaaatctaaacacggtttagtttcaggaatcattcttgttggtgctattgcgctctttgctttttctggaaccgtttctgccgatgaaacaacagctgcgacggcaaatgaccttgtggctactaccgatagttcaactagcgatgattctagcgaacaagcaacctctgaatcgacgacttcaaatgaatcaacaagtgagacagaaagcactgctattgctaacgaagctgatacaactgaagcaacaagcgaaagtaccgattctgacaaggctgatacggcaactagtgtaaccgagtcagacgaaaacgacacttcaaccgaacaagaaacacaagctgacgctaccagcgacacaagtgcttcagacagcacagaggcaactgacggtgatggcagcgaatcagatagtaacgaaaatacaactgatgacgatagcacagccacagatgtcgctacttcaacagatactgaaacgaccactactgacgatacaagtgtcgcaaccatttctattgataatgacacagctactagtgactccgacggtgtaacaatctctggttctgtcattacgattactagcgcaggaacatataccattacaggtaatggtgacggctatacaattacagtagattctagtgttactgatgccgtaacacttaacttggacaacaccacattaacaaacagttctatctcgtctagcggtgacctcaacattatcgtgctgtccgatagtagcatttcttccgatttgacaactgctatcgctgccgaaggtgttcttcgtatttctagtaaaaatagtagcactttgaccgtctcaagctctgccaaacacgctttgaaagctggtagtgttatcatttctgatgctaatctcaatctcacatcaacaacaagcgatggtattcacgccactagtgccgttaccattacaaactctgctatcgtgatttctgctgaagatgacgggattcaaatcgaagatgacaccgatgtcaattctggtgatttaacgatttctgattcaacagtcactatcacatcaacggataaaggcattaccgcaaccgaccaagttaccattgaaggaacttctgttgtgacaatcacttctggcgacgaaggcattgaagggcgctacattaatttaactggcggtacaattaccattagtgctggtgatgatggcattaatgcgactgaatggacaacaaaagaaaaggctgatttgacaaatctaaccaattcaacagatgatattgaaaatgatgtcgccattaatatcgctggggcaactgtttatgttattgcggacggtgatggactagatagcaatggctatctgacaatttctagcggttctgtttacgttacccaaacaagtgttgacaatgctgctcttgattatgacaacacaggtattatcacaggtggaactgtctgggcaattggaaatcaaggtatggcacaagcatttgacacaggctcaacgcaagcttatattatggcaaatgtgagtggtagtgctggcgatacaattacggtaactgatagttcaggaaatgtcatcgcttctacgactgccgcagccgattttggaaatgtcgtctttagcgcagctgatttagttgacggtgaaacttatacaattaccgtttcaagtggtaaccaagccacggcaacagcaaccacagaaacaactgaaagtcaattcggtcctggcggaccaatgcctggcggcgatttttctggcgaaatgcctgacttttctgatggtaattttccaaacagcgacggaacattcccaacagatggcatgacaccacctgatttcccaacaactgacacggacaatgcaactgagactaccgaagatgagacctctgatgctgaaacagaaacgactgacaatacggtagaaaatgaagaaacgacctctgacaccgaaaattcatctgatgaaacaacgattgatgatactgaaaatgaagctgacacctcagacacagaaacggcagacgaaacagattctgaaactagtgaacagactacatcagacgaagctgattctgattcaagtgagcaaactacaacagatgacacaacttctgaagaaacaaatgaagagactagccaagcaccgactgcaccagccaacgatttctttgtttctcatcacaatcaacaaccagtagctagaacgtatttcccacaaatgcaaacaaaaatagctgagcaaacatttttcagacaagcagcaacttctcgccaaaaccttgttctaaaccgtcatcaattgacaaatcaaaaacacaacaaaacaaatcatttttcattgcttagtttcactcaccaaccacagaatttttcaaaacatcattctatgactaaatcaaacactaaacaagcataattaaaaagggttccgttaaacgtaacggaacccttttatgtgcaaagaaagtaggaagtttttgttaaattttaggatagattattttgataaattttcgttgatgaagttttcaatatcatcaaatggaataatgtctttttggtcgtaaaggtcgcaatgactagcacctgcaacagaaatcattttcttgttgtcgcctgtcaatttttcaaaagcatcttttcccatatagtatgaatgtgctttatcgccatgaacaagcaaaacagcattacggatttcattagtgtaataaaggaaacgtgtgtttaagaaacttgtgtttgattgaattgcccaaccgttgtttgaattaagactacgagcatggtaaccacgtggttgtttgtaataagcataataatctttgacaaattgtggtgcatcttctggcaatggatcaaccacaccaccagctaatttgtagctatcattcttgtaatcttctgtacgttggttagcaagcgctaagcgcatttggtaacgtgattcctcattatctgacgcatcaaaataaccatttccagtcacacgagacatatcgtacattgttgaaacaactgttactttgatacgtggatcaatagccgctgcattaagcgcaatgccaccccaaccacagataccgataataccgattttatctacgtcaacattttcaagtgttgaaaggtaatcaactgctgcttgaaaatcttctgtattcacatcaggtgattgcatataacgtggggaaccagctgattctcctgtgtaagatgggtcaaaggcaattgtcaagaacccgcgttctgccatttcttgagcatagagccctgaagattgttctttcacagctccaaaaggtcctgaaacagcaagggctggcaatttgcctgaagcatttttcggagtgtacatatcagcaactaaagtaattccaaagtggttatggaaagtcacttttttgtggtcaaccttatcactttttggaaaaactttgtcccattcttgtgttaaatgtaattgttcagtcatgttcttttttcctctctttattctaatgttaagataacaaaggttatcagatattacaaatacttatattttatagatattatgcttaaaaggcatgcttctcttctaaaatttccttgccagaatacaaggtttgattattaattttcgggcgtgtagcggagccaaatggcaccgtctggataggtttttacctcttttaaaataaccgctgttggttcggtttccatagaaaagccgtcaaagacacttgccatgccttctctaccgtcaattccaagaccgataagaaggctaatctcgtctaaaagccctgcctgcaagaatcccgcattgatgtgtccgccaccaacaaccgctaaacgtgaaacggcaaattctttagtcaaaatttccatggcacgcgcaagattgattttctccttaccgcaggcaatccaagaaatgtgtttgctgtctaaataatccaaatagtctgttgagacagcttcactagtaatgataaggtgaggtttctcatagctcgaatcatctcgccaaagcaatgtcccctttgtatcaacgataatttcatacccttctgccgacactttctttgaaaaatcttcttttccaagcggtcttgcattcgtcgcatggaactcaccatattctgccatttcaagcatgcctgttactttaccacttagtgttgatggcgcgtcaagtttggctaaactatcatagtaagcctccacacctttaatttttgaggtcattgtacaatcaattcgaccgtctaatgaggtcatcatatgacaaatgatataaggtttcttcattttctcttcctttctacaacgacttatactttacacctttaagttaactccaagtcaaggctttttcaaaaatttttttaaattattttgtttttcctagactaacttgtaatttttccatgttccttttcggtagcggatttcataaatgattcctttgataaaccaatctaaaaacatagctgcccacgttcctagcattcccataccaagcgtaacagaaaaaatgtaggcaaataccacacgcgctaatagcattgataacgtgctaactaccattggaaaattggcatccccagcactacgaaaaacaacaggtaacacatagccagaattccaaaaaatactaacaagaataccgtgtgcaaggacaataatccaaacatagtgcgttgcttgcgcagacaaatcatagattttcatcaataacggcattgcagcaataatgagcaaagaaatcgcaccatttgccaaatgaataattcggctaaccttacgcttatagtactctgcttgctcataatccccagcaccaacgcattttgaaatgataactgctaaacctagcacgatagaaattcctggaagcgcttggaacatgataatcgttccaccaaccgaattagccgctatcgccgctgttccaaataaagacacaattgataacacaatcaagcgaccaagaaagaacatgccattttcaaacccaaatggtagtccaataccaagaacttttttaatcatctgccagtcaactttttcacgcaaaaagtttcccaaagttaattcagatgtcaagtgatgtgcaaaccaaagaactagcaccatggcaccaacacgtgatagcaaaatcggtactgcaacaccttcgacaccccaaccgagaccataaatcaaactaatccccattaaaatattcaagccattcatgaccaacataatattcatcggcaagcgtgatttgtttaaggttctaaaaatcgctgcgccacaattatacatggcaataaatggtgtcgataaggcaacgatattaaaatatcgattggcttgggcatgaactgctggcgtaattgagccaaacaaatgatttaaaattaacggtttaatggcaaaaataaaaaccgtaatcacgatactaaagataagggtaaatttcgctaattgattgacagctttattagcatttttaccatcacggtcacctagatattgacctgcaacaataccgccaccagttgcaaaagcagcaaaaatactgataaagagcgccatgagaaactccacaagagaaacacccgacaccgctgcttcaccagctcttgaaactaaaatcgaggcgattaagcctaccagatattccaacccttgttcaataatcaaaggaataaacaatttagccaaatcacgattactaaaaaaatacgttttttgctgtgttgcgactacgtcactttccataatttcctcctctttctaacgtcatctattactttacacctttgagttagctccaagtcaagggaatttttcaattttttatctttattaacaaaaaaacaaccaatctgctttagattagttgtttttctattattttttaggcatcattgtcttagctttggcggaatattggtcaatcacaatcttaatcacgccgactggttttgtcattttttcggtgaattcaaatgttttgccagcttggtgctgcatgagtagattaagggcgtaggctttttgctctgaatcttcgagaagctctgcttttccacgtccgataaacgaactaaagaaagcaccgtatttacaaggcatgtcatagtcataatcaggcaccacttctccctcaatctgaacacaaacattgggattttggtggattaaatcaattttatgcccttgtctcgcaccgtgtgtgtaaaaaataaactggtcagtttcttcacggtattcataaccataatgcaaagggacaacgtaaggaaattcctcatcaaaaagccctaaatgcaaaatcatatttttctcaacaatagctttgatttctgtcaagtcagtcacttcacggtcacgacgtctcattttcgtcataggttgccaccccatcatttcttttttcaaacattatagcaaaaataagcagtaatttcacgaagcggtcaagactatcctacttttcctcaaaaataacagtgactattttgcctgtcatggcttttctgaaattctgactgtctttaatgttcaaaaaaatcgaaaaataataacatttttcaccacaaataataaccactaaaatacaaaccttggtggtttttgtttgtttttactcatatcatcttgcatagccgttttcaatatgctacactaataacgtttttgcgtaaagcaatcgtttaaatacaaaggagatatataggatgaaacgagaaagttattttgacggtggtttattaagttacgttggacacagtattttagctgggttgattaccattttaacccttggaatctgcgcaccttggggcatttgtatcatgataaactggaaagtcaaacatactgttattgacggacaccgtctagcctttgacggaacagccacacaactctttggcaattggattaagtggctcattttaactatcattacaatcggtatctactcattctggcttaatattaaattgcaacaatggattaccaaacacacgcactacttagactaaattaggaaaacgtgcaaaaaaactgaaccacgttaaaagctgaaaaggagttacaaattggaaaagaaaaatgaaggtgcagtaagaaaccttattgcactgttattagtcatttttgctctcgttatcggagctagtgttatcggagatttgatgcacgaaaaaagttcaagcactgctgttgtcgcttctagttcggacagcgatgatgaagaagattatgattatgacgacgatgatgattacagctcatctagctcatcatacagttcaagctcaagctcatcttcttcaagttcttatagttatagttcctcaagtccgagtatctcacgtgaatatcgaaatgctctagaaacagctaaaagctatttaaaatattcatctttttctgaaaaaggattatatgaacaactaacctcagaatatggagaacaattccctgcagatgctgctcaatacgctatcgataattgtggagctgactggaatgcagaggctcttgagtcagctaaatcttatcttgaaatggatccaatgtcagatgccgaactttacgaacaattaacttcagaatatggggaacaatttacacctgaacaagctcaatatgctcttgataatttaccgcagtaatgaagttttgcaataaacgtaaattttatagacgttataatagattttggtaaaatacaaaaactagctagcaatttttgctagctagttttatatattcctcactccacgattgctttggcgatttcttgtggggtgatgttggtaaagtattgggtggtatcaattgtttggagtttggctaagacatctgggtattcgtagcgaagtccgattaaggcttgttcaatgtcagccacatctttgatgccaaagaagtcaccgtaaagtttcattcctttaatgactgatttttcaacattagcatatgtggtaatttttcctgctgggtaacgaacagagcgtttaattgtatattctggtgcttctccgtaagtccagtcccaagtgccaaattgttggtcagccaaggcttgaatatttttcagttcatcatcagaaaagacatattctgtcatatcaggataagattctttcattttatttaacaattgatttgaaaaggcttcaacagtcattttttctggcaattcatctaagatattggtcacacgcgcacgcacagatttaacccctttggattcaattttatcttttgaaacttgcaaggcatttccaagaacagtcatatccacgtcaaataacagacaaccatggtgcatcattcgtcctttataataggcttgcgcattaccacaaaatttctttccgtcaatttcgaggtcattacgtcccgtaaaagtcgctgtcacccctaaatcagctagcgtttcaataacaggttgggaaaaggtcttaaaatcaaaagcaccttcttgtgatttattagaaataatcgtgtaattcaaattattgaggtcatggtaaaccgcaccgccacctgacaaacgacgaaccacatgaataccatgttcatctgtgtaagttttgttaatttcttcgatagcattttggtgtttaccaataacaatcgttggctcattaatccaaagaatgaaaagctcatcttcagctaacaattcacgaaaagcgtaagcttccaaagccacattgtaggcaggattatgggagttattgacaatatatttcatgcgaaagctccttttataacatataaggatagtatagcaaaatcgccgctttcagtctcttaatctgcttggaagaattcctcaatgaaatgctgcggtcaatcccaagctcgtctaaggcgactgacacaatctgggatattttccaaatcaattttactaaacccaagaaaaagactttcctgcggacaagctgccttttcttgccagaattgcatggtatcgtaaacacgaaccccttcgttttcagcttgttttatcagatcacactgattgattttatctggaaaagtcaccaaaaaatattgaccgctgacatttgatgaaagctttatcggcgactgaaactgttcaaattcctttttgaatgcctcgtaacgcttcttaaaaacatgattcatcttgcgcaccaagcggtcataatcaccacttgataaaatattagccagtgcaatttgattaagaagattcaccgtgctattgtacagctgaaatttttccaagaaagcttctgtaaattgatcaggcaaaacgatatagctcatccgaaatgacggcgacagaatttttgaaaaagtccccaaataaatgacacggtcaagataatcaattgatttcagagcaggtattggtcgctcgtagtaacgcagctcactatcgtaatcatcttcaatgataaacgaatccttttcttgagcaaaagctaaaagctcctgacgtctggaaatcggcataatcatgcccaaaggaaattggtgtgagggtgtggtgtaaatcatttcaatccttgcgttctcgtcaatattctccagatttaaacctttctcatcaacctttgccgttacgataggatacgcatttttcttgaaaatttctcgcgcctttggatagcttggttcttccattaaaacggatttttgcgtatctcctaaaaattgacaaatataatctaacgattgttgcaaaccgctggtaatgataatctgactcggctggcacctcactccacgaatcctctccagataacgactgatttcctttctcagtctaaaatctccttgaaatggctgcaatgtatataatttttctgcctcatctaactgctcaatggcattttgataatgcttcttccacacttttttaggaaaaagattactggtatggctgctgttggttaaatcatagataatatgctcgtctgtcgcttgttttttcgtatctgaaaattcttccgtaaaagttttttctgactgaaaagtcttgggcaatttcaagacataaaatcccgcattttggcgactttcgatgtaaccttccaaagtcagctgcatataggctcggtcaaccgtattacgactgacaccaagcattttagccaatgttcgtgtgcctaaaattttctcatttggcgacaagtatcccaagagaatatccgatttgacttgctgataaatttgttgatacaggggagcacttcccttttttcgattaagatgaatcacaatttcctccaaaatggcacctaaaaattttgtaatactggcactttttattataccacttatttattacaatttagagcgaggtgaaaatgtcatgaaaagaaatcgttgtaattcaattaaagacatttgtctaatctttttagccatttgttttttagctactggtggtatatttgtcaaactaagcccgctcccaccaatcaatacgggcttttatcgtgtcttattttcaattccgatgctgctgccctttatcaagaaatcagatgtacaggcgcttagtcgtaaacagataatgaccattattctggcaggggcgttcttagcaggagatttgaccttttggaacagttccttttcttacactagcgttgccaatgccaatttattagtcaatttaacaccttttacggttatcccagtgagttattttctcttcaaggaaaaaatgactcctaaatttttattaggtggtttggtaactttggtcggtgttttggtgcttatggcaaataaagtcagtctatcgtctgaccgtttgttcggtgattctcttagtcttggcgcttctattttttacgccatgtttatgattaccgtttatcaattgcgcgacaccgtcaaatctaacgtgattatgttttttagtgcctttggaacactgttagtgcttgctgttgtgattttcttgaccgaaggattttacctaccacaaaatatagcagagcttctaccacttttggctttggctctcgtctcccaaattcttgggcaagggttactagcttactgtctcggtaaagtcaatgccagcctatcttctttaatcaccctatcacagcctgttgttgcggcactttacgcttgggtgatttttcaagaaaatctaaatctccaatcagtcatagctattgtcatcactttaatcggtgtctatcttgcgaaaacacaaactgttgaagaaaacgaaaaagcctagaaatgttactttcttaggctttttatggttgagaaaatttctcttatctatgtgtattagagagattatggtcaattaggatttagttacctgcgtatgctgcaacttcttcaatcattagtttggttgattccaaacctccaccagacaaataccaaaggtctgatgttaaggtaatgattttattattttgacctgcattcgttgcctgaatcaaatcattatttaaaatatctgaattggctgagtcatctcccccaatagccaaagtgcggtcaacgacaaaaataatatctgggttgacttcactaatactttcataacttagaccagaaccgtgatattgattacttgagcttgatgaagaactcgtgtctgatgatgaacttgatgagcttgaagaacttgaactgtctttagcaccgtggcttgattcttcaatttccaaatcggttgctttaaatccaaggtcctcataaacaaatgaataacgtccatcagcagcaatacctgacatattgccctcattaagcatcaacattaacgttgttttggtcgtgtcagcatttttctctgctgtttcttcaatcaaatcatcaatatctgataattgacttttggcttctttcttggcagaactaccgaaaattttagctaattccgtaacgttcttttgaacagaattccaataatcactcgtatctgttgaaaaataaattgtcggtgcgatttcttggaaatcttccaattgacttgatgttcgtccagaagcgataattaagtcaggttctagatttgcaatagtttccaaattaacttcttttaaatttccgacgtcagtaatagaatctttagaagttaaatcagagagatacgttggtacagaccctttcggcatcccaacaatcacatcttcgtaccctaaagcacggagagtatccgcaacaccaaaatcaaggacaaccacttttttaggattcgtcgctacgctgacttttcctgttgcatctgtaatcgtcacttcagaggcgtcactagattggcttgtactatttgagctagagcttgacgaacaagcacctaaaaatacagccataacgagtaccatcattgtggttaatagtaatgtcaatttcttcttcatgttttcaccatataaactttctattggtaaacacaaatcctattaccattaatctcatctaaaataaggtccatgtcatagagattgtctaaaatctccttcaccataacttgatgaggcgttcctgaacagaaaacttttccatccttaaacgccaccatttcatcaacaaactggctggcaatattgatatcatgaatgacaataatcaccgttttccctaagtcatcaactagagaacgcagtattttcatcatcgaaataccttgcttaatatccagattgttaagcggttcgtcaagaaggacgatgtccgtatcttgagctaaaaccatagcaataaatacacgttgtaactgcccaccagaaagcgtgtcaatcatccgctttctaaacggctgcaagtccatgtaagttattgcttcatctattttctcttggtcttttttcgtcaaacgtccgtgactataaggaaaacgaccaaaagcaaccaactcttccaccgtcaatttcatctgatagtagagttgttgtttgagcatggttaattctttggctaattccccagaagaccatgcttcgatttctttatcttttatcattaagacacctttatctttctttgaaagacggctcataatgcttaaaagagttgatttaccggcaccgttaggtccgataaaggctgtaaacttgcctggctttatctccaagtttacattatccaaaacaattttgtcgccataagctttctcaatgcttttcatttttatcatggttttattcgctccttgtataaaagatagaagaaagagccaccaccacaaaattcaatgaccatgctaatcgtcacactataattaaataaacgctccacaatgctttgtcctacaactaacataataaaaccaagcaaactcgttgctgtaaataaggttttatggttagaatcaggcatgatttgataagcgagattggcaacaataaatccaaagaaggtcaatggtcctaccattgccgttgaagctgatgttaacaggacaacaaaccataacacttgtcgttgcacatgtggaacatcaattcctaagagggttgctgtctctcttcctagataaaaaacatcaagctctgcactttttcgataaagacagatagccgtaaaaaggaccagaatagctactaaaacaaggacatcactatttgcattttgaaaagaagcaaagagtttactttgaagtttatcatattcattaggatccatgaggatctgcataaaggttgataaactgcgaaaaagcgttcctagtgacatacaaatcagcagaattgttccaaaacctttttccaagagttttttgatactaggctggagaaaaaagaagaaaatcaattgtatcgctaaaacgatgataaattctacaatagcattgggttcttcttgtgaccaatgccaatagaaaaataaataggtcgattgcattaacacataaagattttccaaccccaaaactgacggcgttaaaaagcgattaccagttattgtctgaaagctaatcgttgctaagctagcacttattgccacaagacaataagcacacaattttttcaagcgaagctttataacaaaaggcaacaacgaccctccaataggaagtaaataagcccaaaaacagacaacagcaagcacaaatagaacagctataatgcgttttgatgagggatttttcttagtcatagacatcacctcgccataacatccaaatgaaaatcgcagagcctaaaacgcccaatattactgaaaccgataattcataaggacggataatgagacgagctaaaatgtcgcatgccaagaccaaacataccccactccaaaaaacaagtcgcctactttttttcaaatgattcccaacaaaatgacggacgatattaggaataatcacgccaagaaaaggaagagaacctactgtaatcattgttactgctgtggttaaagaaaccaaaaacagcgctattgcctccatttgagaaaagggcagaccgagcattgtacttgcttcttcaccaaggttcatgattgagaaactttcactaaaacgccagataccaacaacaattatcagattaagaaataaccattcgtattgattggtctgaatcatagcaaaagaaccctgtgtccacgaggtcattgattgtaccaaatcaaagcggtaagcaatcatttctgctactgctccaatcatgccaccataaatgagaccaacgagtggtaacatccatttttccttaaaaggcaatcttctaacgactttgataaaaaataaagtcattaacattgaagagataaaggcaaaactcattttttgagctaagcttgcttttggaaaaaagaaaagtgagattagcatgccaagttgggctgcttcgacagtcccaacagtagatggcgcagcataattgttttgtgtgatggtttgcatcaacaaacctgataaactcatggcacccgctgccaaaacgattgccaaggttctaggtaggcgtgattcaaaaaagacttgataggctacctcttccccttgaaacaatttaagccaggaaaattgtgaacttgccccaatacttagtgataagaacattaagacaagactgaggggaagcaaccagcgtatagctttcataggcttcctccctaaaaaattgaacaaagtatttccataccctgtccactattactttagcaaattttcatgcaagcgtcaactgatattacagaattttctgaaaattaagtatactgtttcaaatataaaagtatgctctaaaactatgtttaagagcatacttttgatttatttcttcggtgggttatgaatagcttcgccaatggtatcaaggaaagcttcatacatattttcagaaaaagttgggtgtccatgaatcgcttgggcaacgtcatcaacggtcaattcattttccataatggttgccgcttcattaataagctctgctgctgcggggccaatgatatgcacaccaagtatttcatgatacttgctgtcagcgatgactttgacaaatccttgagcttcgttagacgcaatagctcgtccattgcctgtgaagcttgattttccaatcaaaatatcgccgtattgctcacgcgcagcctcttctgtcattccaaccatggcaacttctgggtgagtataaaccgctgctggtgtgtaggtaaggtttgctttgcgatggttgccacgtagagcattttcagcagccacttctcccatacgataagcagcgtgcgctagcattttttgaccattgacatcaccaggagcataaataccagatattgacgtttcttggtaagcattgactttgatgcgattaccttccatatcaagattgagattttcaagaccttgcatttggggaacacgtccaatcgatagaagagctttatctgcttgaattgtctcaccattggttagcgtcaactcaagctggctatttttctcaacaatttcggctactccgacattggttttaatggtcataccttttttcgtcagaattttttgcaattcctgcgaaatttccttgtccatagctggaataatgcggtctgccatttcaataacggtcacatcaacgccgtaagatgcccaaaccagtccaagctcaatcccaacaacaccaccacccatgacagctagtgatttcggtacttcacgtaaatcaaggatatcatcagaagtcaaaacaagcggtgaatcaatacctggaatattaatgcgtgatacttttgaaccagttgctaaaatgatactatgtcccttaatcgtttgcgacccaatcgttaccgtcttgtctggattgacttgagccagtccgtcaaaaatggttactttattagctttcaagagaccacgaacgccacctgttaatgttttgacaacggaatttttaaactcaacggttttatccatgtcaatactgtaattagttgaagccagattaataccacgaccagcagcaatttttagtccatcaaggatttcggcatttttgagataagttttagttgggatacagccaacatttagacacgtaccaccaaattctgatttttcaacgatagcaattttgccaccgagttgcgcaccacgaatggcggcataatagccagcaggaccaccaccaaccacaatcatgtcatactcatcagctgcaagtggagctttttgttcagaagtcacatcagccgtcaccgcctttggcacttccaagcctgctgcggttaagtctgccgctgcttgttctggtgttacttgcacaacttcgtcaataacttcaccttcagcaccaaggtagccaatgatttctgtcacaggaacaacatcaccagcctcgtgaacaattttcaaaagcatgccagaatcttcggcttcgatttccatattcgtcttatcagacatgatttcaagcagaatatcgccctcttggacaagctcaccttccgcttttttccattcaataatttcgccctcttgcatgtcaacaccaagcttgggcatgataatttctactgccattttacgttttcccttcagaaaattcttttgtttctcagtcagctttgggcggctctcacccaagcaaccgactactatatcatttatttgtcaatattaggctttaaagatgaccgaatcacctatgtcaccgcccacgttttttactttagattagcaattctagcggattttcaagaagcgcttttaaatctagcatgaattttgcaccattcattccgtcaaccaatcggtgatcaatggtcaaactcattcccataattgggcgaataaccacttcaccgtcatgaacgacgggtgtttcaatagttgctgaaatcccaagaattgccgaatttggttgattaataatcggattaaacgacttcactccaaacatcccaaggtttgttatggtgaatgttgagccagacatttcagctactttcaatttaccagcttgtgctttttgaatcacatcttttgatgctaccacaaagtctgacaaactcatctggtctgcaccatgaaccacaggaaccactaaaccttcagaaagcccaacagcgattgcaagattgacaaaatgatgtagttcgatgtcttgagcgtcgttaatcagagaagcattaaggaaacggtgttcctccttcatcaaggtcttaatcacagcaagcccaattaagtccgtaaaggtcaccttgtaaccagtctttgccataattggctcaatgagttgcttacgcaaggcaatcagattcgtcatatcaatatcataattaagcgtaaaggtcggtgctgtaaagtaagaatggctcattccctttgaaattgccttacgcatagcagacatcttaatgacttcaacgccgtcacttgcagccgtaacatcagccaaagctcctgcttgcggtgtcacttttacatctgcttgttctttttgcggcgcaacatcacctagacttgctaaaacatcttccttggtaaccttaccagaaacacccgttcccaccagtgtctcaaggtcaacacctttgtcctttgcaatcctacgagccagtggcgtcacacgaatcttactaaattgttccacatcttccttgtgaatccgcccattttcaccgctgccagtgattttttcaaggtcaataccacgctcacgtgctaactttctagcagcaggcgtagcacggacttttccagtctcagacgtcttttgggaaatcgctggcgctgtgcttgcttgcaacggttgagctttcgcttcctgagctgatgctgactgttcaacgtgtttctcaaccacagaatcaacaagagtttcaccctctgctccgatatagccaataacttcggtaacagctacgacatcacctgctggatgaacgattttcaacagcacgccagaatcttcagcttcgatttccatattggtcttatcagacatgatttcaagcagaatatcaccctcattgacctcatcaccttcagcttttttccattcaagaatttccccttcttgcatgtccacaccaagctttggcataataatttcatttgccacagaaaacacctcccttaggcatcacgaccattgcgtgccattttataaatggctgctttaatcttagcaacgtctggcaaaatgccctgttctaaaacacgtgcgtatggtactggcacatcttcgcttgccaaacgtacaatcggataatcaaggtaatcaaaagcttcactttccgtaaccagcgcagctatttccccaataaaaccacctgtcttgtaagcgtcattaaccaacatgagcttcccagtctttttcaccgaattgataatcaactccttatcaagtggaataagtgtccgtgggtcaaccacttcaacgctaatgccgtcagctgctacttcatctgctgcttgaagaacacgctccaacatacgaccataagaaacaatggtcaaatcagttccctcacgcttaatatcaccttttccaagtggcaaataaaaatcagaatccaagttcacttcctctttcttgccataaagcgcctttggctccatgaaaataacaatattattatcacgaatggctgattttaaaagccctttggcatcattagcattccctggagcaacaaccttaataccaggaatatgggttaaccaagcttccagagactgcgaatgttgcgctgctgaaccaataccagaaccagaggctacacgaaaggttactggcgttttcaaaccaccaccaaacatataattatttttagcgccgttattaacaatagcatcaagggcaatggtgataaaatccataaaggtcacatcaacaatcggacgaagcccagttatcgcagcgccaatggcacttcctgcaatagctgcttctgaaatcggtgtatccttgatacgttcaggtccaaactcctcaaacataccgacagacgttccaaagtcgccaccgtaaatgccaacatcttctcccatgagaaaaatcgtatcatcttttcgcatttcttctgtcattgcaagattgacagcttcacgtaatgccatttgttttgtttcagtcattgtctttctcctcttgtgattaaaaagctgcctaatctacccagacatcttcaaatgctactgacaaatctggttcagggctattttgagcaaatgcgtaagcatcatcaatttctttaaccacttgcgcatcaatagcatccaattcgtcatggcttgccaaatgattttcagtcaaatacgtacggaatttgacaagtgggtcttttttcttccagtcatcaacttcctctttactacggtatttacctgcgtcagctgtcgaatgcccaaaccaacggtaagattctacctcaacaatggctggaccatttccagaacgcacgtggtcaaccgctttgcccattgtctcataaaccgctagaacatcattgccatcttcgcaataaaaaccaggaatgccataagcttcagcccgtgtgtagagatgcggtgtattggtcgctctcgtaatatccatagaaataccatagcgattattgataataaagaaaatgacaggtaacccccaagtagccgctaggtttactgattcatgaaaagaaccctcatttgtcgcaccgtcaccagaaaaggcaacaacaatgttgtccgttttttgataatgctgtgtcaacgccgcaccaacagcaagcgcataaccaccgccaacaataccattcgtaccataattgcctttttcaaaatctgccaaatgcatggaaccaccacgaccttttgacacaccagtcaccttgccagcgagttcagccatcattttattcaaatccatgtctttagcaatacattgcccatgtccacggtgatttgaaaaaataatatcatcataagtcaaatgtgccattgccccaacacttgccgcctcttccccaactgaaaagtgcgtcataccttggacaaaaccacgtcggactaacttattaatgcgcatatcaaactcacgaatacgctgcattttaagatacatatctatatattgttcttgagacaaattcatcatattgccctccaaatatctttttcttagtccattcatcatatgatattatttcccaaatcacaaattatttaaccgaaactttgaaaacgttttaaaaacaatggtaaaaaaaagacgccaaatgcgtcttttactacttattgaaattgtcaacagtaaattgaggatactgaatttttgtaactagctcatcataattagcgattaattgctgaaacgatacatcaatataacctaaaaaaagaatttcttcaatatcttctttattaaaaaagaccaagtcctgactaactactcctaaaggtaatggcacagcaccaaaatcaaaataacctttttgaccatctttttctgtgactggaaaaagcgtactaatcattaaattttgtgagtcaccattcacacgaacaacagtcccaataggtaaatgttctctctcattcattttctaactcctctaaatatttcttagactctcggacataaaaaagttcaggattttcgtctgcgatttgtttaaatttttcttttgcagcagatttatcattagcattcaataaattaagagcttgataataacttctactaatcagcattaatctagtacgaggttcatactcaaaagcataatcacttacattgccttttagaatatccaagataaattctgaactctctttatattctttggaaagcttatctaataataattctgcattttcaaattgtgataaactacaatagtttaaaaactcataatacaattgattttctttaattctatcactagttgatgaaaacatctcactactttttatttgatttaaaagttgcaatgattcttcaaattttcctcgaagaaaagcaacttgcgccttatttaaaatacaatagtaattaaatttttttctttgacttacaggaatatgtgaataagcataattaaaatagtctgtaattttttgtaaatcaattttttcatataacatcaaatatgtagactttcttatcagattattgatgaaaatcccgaaaaatgataaaacaataatattattatcatgctgtctttctgttcttgaaaaagttgataaatacaccataaaattggtatcatcagcaagagaaagttgagttttggtaaataaaaaattaattctatcctttgtttagatacccaattttgaaaattattcttcatgcttctcctcctcatggttgataattaacccaattcctagtgcacctccagctaaacttccaaccacaagtccacccagtccaaacgttgatacagcaaatgctccaacagctactgttgcaactagcgtcgtaccaaattctaaacttttgattgcttcacgtttcattatttttcctgcagtttcaaaatcagcatcctcaacccaataatcatattttgacatatgaggaccactatttctatctcttaaatattgtccttgttcaaaagtcactttttcttttaatgggaagtcatcaatttggatttcatcaggtaatgttatagttgattctacactaccataagcagctaaaataccgttaacaacttttatgccataggttgtcttagaggtatcatcactaatactacctgataaacctccaaagccatttgaagcaccttgaatttgatacgaaggtattaaatcgctatcaactagtgccgagtctaaaataggcaaggttaactcaccattctttttcaatgtagtatcacctgatttcgcactagcaagaccatctttaccaaagataagtgctgttttacttgaagcagaaatttcaaaggtgtatttagcataaccataaatattatcataaagaacaatctcttggttatctttaacaccaactccaatacttcttaactcctcttctgttactccacttgttttagaaagaacctgattgattttaccagatttttgccaagttaacataattggcattgctgtttcaagtgccatagcacctgattctagtaaatacccactatacttggaatcatacaaattcttagcaagagcatttttaagttggtctcttctagccttgccgttaacaactgacttgacctctttgacctcagctttaaaggtgctatctttgtaaaaatctttggctttcttacttgtatatgagctacttcctaaatctgacaagctactgagttgcgtattctgctcctctagaatatcccctgcttcacttgtaaagactgtgctattgaaaatccccatatccttaatcgtgttggtcaggactttcttagcactcttaaactctgaaatcgcatcagcagttgtcactttggttaatgaattgttaatgcattatacagaaaaagcgcaaaagcgccttaaaatcaattagtcaatttgctttcgtggaatttccaaattttcttcccactcatggtaattgactttcttcattatcacttggaaaataattccttaaaatcctttattcacggactccaatcataatatctgtaaaggtatcaccgttatcggttaaatataccttatagaaagttggtgtttttactgttaaatttttatcaacaatttcatttataagaatttgaatagcttctgaaaaatcacgttcggtatcaccatttgctcttgtcgccattaaatcagtcaattgaaaatatgttctgaatacaaatcggtcatcaagcttacaagtatcttcttcaattggaataaataattcgacaatcatattttccgtctgattgaggtcactattgattgaataaaataactgtcctgctattgtgtagcctgcagaagtaatattagtgataaaatcattaaatgctaccgataaatcagagagatttacttgataaagacaagaaacaacattcatttcgtggatagattgattataactaatcattgttttgctccttaaatggaagaataatatcaacccaatattcatcataaactttaataaaagctagtaaaagtttattctcatcatccaatccttcgttatctaaataacttttcaaattgacaagggcaggttctaagtcactcaaaaaaggaacacgttcacgaacagcttgaccaatttggtaatcttccacccatgaataattctcaccactttcaacagcgctatttacagggagatagattgacacttcctgttcttcattggtaacatcatctaatgaaaattcgacaatagtgggaccatttttataatagccatcttcaaatacttgctcctcataactctcaacaatcacaccaatatcttcaaacgataaacgtccttgtgttttaaccaaactatggcaacttaatgttataatatccattttttctccttatctatttttttaacttcattttctttttttcttacctgttttctttgatttcttagtttgctgcaaagctcccattgcttcatcataacgtgattgcttcaactctggatgccagtattctgaagttgctgtaaataaagtgggaactgccaaagtcattaaagccattactgaacccatggcataatcaggtgttcgaattccatcaagcccaaacatatcagccaatacaaatactgcaacaaaaataataattggtagtgctacaccatatactggtatctttaataaaggatcttttctaggttctttttctgtgcagatgtcaaataatgaatattgtaatatccatgtcaatatcggaaatacgattgggtaataaatcaaaaattgtcgagataaacgagtcgtttcataattttgaggattcaatataaagactacccagacaactatagttgcaaaaatacctgaaatataagggataagcaaccaattgaatcttgtcattttttcaaaaagcttctctcccaaaaaattcagtgcagataaagcaatacagccagttacagaaataatgaaaaacaggaattggaacctattcggaaaatagaaaccaaacataagagttatcataaacgctagaaataataaagaccattccccaaacttaaatgactccttagtaaatatcactcgacaataataagccctaatcattctttctaatttactcatccaaacacctttcctaatgttttaccaaaattcttcataccatctgagatagatttaattgactttgttgcaaattctttagtagttgtcgctaatttctctgtacaaggagaaagagcattagtaacaacaacagttgctgctatacttgtagctactactgcaactcctgcaactacaggtgctgctgctgtcaatccaatagcggtcactccgacagtggctgctgtagctactgctgaataggtaacagtggctgcaacagtatcaacaccaacttttgcagcatcaattccaatacctgccgcttgtgatactgcatattcagtactgcctcgttgaataccgtttttctgtgcaatatcatctgttgtaactgttcctactccgacctcaaaaagacctgcggctaaactaacacctgggatagcttttccaactcctttagcactcttaattgccttaacatctgaaattaaactacttgcgccaaaagttagtttgttcgccatacttcctttcattgccgcaagacctttatcaacagtcatagcttttaagttagatttaactgcttgccaatttactgggtgtcctttaataatagcttctggatatagtaagcctgaagcttcaaaaaatgctttggcatatttcccattacgaacatttttaccatttgatgataaaaaactatatgcttttcctctttggagtctgttcatatttatatatttatcagctccaaaaaaagtatcaatatatttattaccatgcatataagcaacttgtggaatcccatttttagcagttgtttcaagttccctaatatgcgttgcaacataacctttttgaatattttttaaatagtgttttgcatttgttaatgtttcattagtgcgtttaaccacatcattatccataactttttgaaattctttataatagtcgcttcccttttcccttagtgttaacatgattggcgttggcaggcttgtttccaacatatacccactatacttagaatcatacaaattcttagcaagagcattattctgttactaaaattatccaaagtaaacctttaaataaaaagggcacaagtgtgccacttaattaatacgcatacccaactaaaataataactttttctgccccatcatctggtaaaacatgataaaacggagtgttcaattctcggtcattttgttccaatgtccacaataatctcgcatatgcttctttagttaattcctcataattacggtcaattgctgttaaaataatattatcaatttcaaaataagatgaaaatctcattccttcaatctcaatataatcctcttcaacaggcaagaaaaattcaatatccatattaccatcttctggaacgttgtttaagctataaacaagtggtcctgatggatgtgcgccagccgtttctaccgcagttaaaaaagtatccaattcttcttttaattctgtgatatgaaaagtctttcgtttcctaaggacgttttgtgcttgaaaagcatcttgaacagtaactccctcagctacagtatattccattagtctacctccaaatcactgtatacatcaaccatcaactcatcatctgaagaaagtgataaaacatgataaaccgctaaacgttcatgttcatcttctgaatatttggaaactaaataagtataataatcagccaactcttctgcactaatctgcgcaaagtctttgctgtcaatcaatagattttctttaaataatagttgaggttctttacctgttggattaatcgcattgccaaatgttgtaaatatttcaatatcacttttctcatccgataatggataaaacttaaagtaaacgggaccgtctgagtagattacatccagcatatctccgataaattcttgacaagacgtatagacttctgcacacatttcttctaaaataaattcttcaggtaaacttgcttcaaagccaacgatttggacaagacttaatttttttgatttaatatccatttttatctcctaaagctcatcaatctcttctggatgttgtttagcataaagcgccgcataaaaagcgtctactaccaaagctggaatgacaagtgaaaatagtattccgataacaagcccaaatacattctccaagtaacctgttaaaagtggtggaacaaaaacaactaaaccgaagataagcaaaaaattacttgagaataacttattatcctcactattaaatttcgattctttttctcggtatgcaccatttgtacgacgatctcgtctgtagaagtaagggtagacaaagaaagtcatgatgagagaaataagtgttgttaaaataataaaaaataatactaacttagaagaaaatatactaaaatctgatggaactgtagaattatttttagaaataaacaataccaatgcgataaaatcaagccaatttaataacgaaataaaactaagtgttattaatatatatgttaaaaagcgatgttttaaaataaattcatcaaaaaatgaaaatactgctcctagcaaattaataacaattccacatccaaaagccatcctaaacatacccaaatcatctgcataccaatgcttgagcccaataataaagaaaattattaaaaaaggaagtgatagccatggaactattttaatataccctaattccacagcgttcgtaattataggtccgtgataacgttctaaaatatccttttcttgctgtttttttgactgtttttttattttactcataatccaaatttccctgctaatcctttcaaactatttttggcataatcatttatagaattttttcctccccacttatgatcaaatgccttagaaatagcaataccaaccgcagcacctaccacagttcccaatggtccacctactaaagttcctactgctgctcctgcagctgctgcacttgagcttgatacaacatcaactgtagtgtctactgcaaaatttctgactttttcttttgtagatgattttctatcatcaataaagtcagttttgatgttagaaccaatcgtcattaccgttcctgcaaagcctaaaaccttgcctgctttagagaaattagaagcctctttaaaccctttaaattcattaagcgggttaattgttgatttaaaattatcttttaaaccagatttaaaagcttcttttcctgaagttccgacacctttccagtctattcctacttttccatttgccttaagttttcgaccattataaagtgttgtctttttaaatgaaaaatcctcgccaacagtctttttatattctttagtacctttggaataaaggtgaactgtttttgttttacctttgcttggctttttatacaagaaacgttcgccaactttcacacgaccttttgaatcgaccgtgagttcgcgaccaccaataaatttcttctgcttcaaagctttatcagttgcatccaaaatttttacaacttttttccccttacctatcgatttcttagtcgaagtaatcaatataccagcttttacttctaacccacttgtttccaacatatacccactatacttggaatcatacaaattcttagcaagagcatttttaagttggtctcttctagccttgccgttaacaactgacttgacctctttgacttcagctttaaaggtgctatctttgtaaaaatctttggctttcttacttgtataagagctacttcctaaatctgacaagctactgagttgcgtattctgctcctctagaatatcccctgcttcacttgtaaagactgtgctattgaaaacccccatatccttaattgtgttggtcaagactttcttagcactcttaaactctgaaatcgcatcagccgttgtcactttggttaatgaaacaatgtcagcaacctcgtcaattgctttattaatctcatcagagcaagtctttaattgttctaagggggaatcaaatttatccaccatttgttgtaagatatccgtgtcaataatggcactatcgcttgtttcactaacggtttctttaaaggtactaatcagattatcatacccttgtgagataaccgctaagctattcacgtagttggtcaacaaaggtacttgatagttggtgattttgttatcaatagcctccttaacattcccttgaagtgcgtctgaatcagctgtgctttttagcttgcgactagcactttccaactgacttttagcgctactaatggaactggcaaggctctccttttgcgacaagacctcgctcatcttaatcttcataaatctctcccaatgtaatcgttttttctaagtattatagcataaaataagcagactttcagatattctcaaatatgaaaatcaataaaagtatattaattcctacattagcataattttacttctctcccaatatttcccttaccaatttttcgcaatcgactttgtcgtttttgattttatcagattggttgttgccagtcggtacaaatcggaaaacgataaattctgtttcttctttgtcatcaccaatgattctgtgtatggattgtttgacacgcaagacttcaccgcaattcgccgtataggtctttatggcattattttccaaaacttgaatggttacatttccttttgttggtacaataatttcctcgatagcttggtgcttatgccaatcctgaatggtatttgcaggtaaaacattttgatgaatttcaaattcgggatataagaaataattcaccttagttccattgtctttttcaaccgaaatagcctctgaaagtcgccgaatgtcaatagatttcgccatgataaccctcctttgttttgaacaaagtgtatcacgacaattgagcattttcaactaaaaatatatacctaaaacaaaaaaacaacccttgaaaaacagctttgctattttccaaagattgtctaaatctattattcgctaatggcgttacctgtgtaaagttggtaataacgacctttttgcgcaatcaattcgtcgtggttaccacgttcgatgatacgtccttgttcaagaaccatgatacaatccgcattgcgaactgttgacaagcggtgagcgataacaaaggttgtacgacctttcatcaacgcatccataccttcttggacgtgaacttcggtacgcgtatcgattgatgatgttgcttcatccaaaatcaaagcaggtggatttgccacggctgcacgtgcaatcgcaagcaattgacgttgtccttgagataaattacttccgtcacctgttaaaatggtatcgtaaccttctggcaaacgtttaatgaaatcatgtgcattagctaacttagccgcagcaatacattcgtcatcagtcgcattcaaacgtccgtaacggatattatccataaccgttcctgtaaagaggtgcgtatcttgcaatacaatccctaaactacgacgaagatcagcttttttgattttacgaatgttaataccgtcgtaatgaatcttaccttcttgaatatcgtaaaaacgattaatcaagtttgtaatggttgttttaccagcaccagttgacccaacaaaggcaattttttgaccaggttccgcaaacaaattaatgtcatgtaaaaccattttatcatcgttataaccaaaggttacatctgagaaggttacacgaccttcttgcttgtgataagtcacagtgccgtcttcgtgtggatgtttccaagcccacataccagttgtttcttcaacttcttgaagattaccagcagcgtcctcagtagcattgaccaattcaacataaccttcatcagtttccacttcggcatcaagtaggttaaagacacggtcagcaccagccatcgccatgataactgagttgatttgttgactgatttgtgtgattgggtttgtaaaactacggttaagcgctaggaaagaaaccaatgttcccaaagtcaatccggcataaccatgaagtgctagggttgccccaagcatggcacaaagtacataggaaatatgtccaatattagctgatactggcatcaaaatattagcatagatattggcgtttgtggcagaatagcggagctgttgattgatttttcggaaatcttctttagcacgttcttcgtgattgaaaactttaaccactttttgaccgtccatcatttcttcaatgaaaccattgacacgaccaaggtcattttgttggttatggaaatgtttagacgattgcgaagcgattttacgcgcaacagttaacaaaatcacaaccataaatagtgataacattgacaatggcacgttaagaataagcatgcttgtaaaagtcaccacgattgaaaagaatgaattgaccacttgcggaatactttggctaatcaactgacgaagtgtatcaacgtcgttagtatagatagacatgatatcaccgtgggcatgtgtatcaaaatatttgattggcaagcgttccatatgagtgaacaaatcaatacgaatacgacgcattgttccttgtccaacataaaccatcaaacggttataagtgtaagaacttagaacaccaacgataccaataatgattaattgaaaaatagcgtgcgctaaccctgaaaaatctggatttttagcagctaaaagaggtgtaatataactatcaatcaatgtttgcatgaacaaactaaagcgtaccatacaaagcgctgttactaaaatcaaaaccaatactagcaagaagcgccatttatagtttttcaagacatgagccaacacacgttttagcgtatcttgtttattaatttcttttttggtttgagccattaattgctacctccttccgcatcaaaatcgccgccaccttgttgttgaacatcgttgatttcacggtagatagcatttgttttcaataattcatcatgacttgcaaatcctgaaatcttaccatcatcaagtaccaaaatcttatcggcgtgttgcacacttgaaatacgttgagcgataatgattttcgttgtcccaggaatcgtttcagcaaatgattgacgaatattcgcatctgttgcagtatcaacggcacttgttgagtcatccagaatcaatacttttggttttttcaacaatgcacgggcaatacaaaggcgttgtttttgaccaccagaaacgttgctaccaccttgttcaatccaagtgttgtatttgtctgggaagcgttcgataaattcatctgcgcaagcttgacggcaagcttccatacattcttcatctgtcgcattttcatttccccaacgaaggttatccaagatagtccctgagaaaaggacatttttctgaagaacaaccgctacttggtcacgaagaacttccaaatcgtattcgcgaacatcacgtccaccaactttaattgaaccagaatcaacatcataaagacgtgaaatcaagttagcaaatgaggtcttaccagaaccagttccaccaataacaccaatgatttcaccagatttaacgctcaaattaatatcagaaagcacttcttcgccaccgccgtgtttgtaagaaaaatgcacatggtcaaaagtaatgcttccgtctgaaacttccatcaatggattttcaggattaacaatgtcagctttttcgttaagaacttctgaaatacgttccgcactagccatactcattgaaatcataaccataatcattgataacatcatgagtgacatcatcatggcaaagatataagaaagaagtgatgttaactcacctgttgttaaactaccagctacgataaagcgagccccaaaccaagacaaacaaatcatacaagcaaagatgataaacatcatgattgggttattgaaaataacaattttttccgctttgacaaagagacggtaaatgttttcagcagccttagtgaattttgtattttcatgttcttcacggacaaaggcttttaccacacgaataccagaaatattttcttgaacactggcattcaaatcatcgtatttacggaaaacatagttaaatgcaggcattgctttacgcataataaacagcaatgaagccgccaagatgataacagcaagaaggaaaatcaaactcaattgacggtcaaccacaaaacacataaacatactgaaaatgattgttaacggtgctctgacaaccacacgaataatcatttggtaagcattttgcacgtttgtcacgtcagtcgtcatacgtgttacaagaccagccgtgctgtatttatcaatatttgagaaggcaaatgtttgaatattgtcatacattccttcacgcaaattagcagcaaaaccagctgaagcctgcgctgcaaatttccctgctaggaaacctgtcgtcaaaccacaaatagccaaaagtaacataaacaaaccatatttcatggctaccgcaagatttcctgcctgaatcccttggtcaatcaatttcgaaatcacaaagggaattgacatgtcgaagaaaacttccaaagcggcacacaaaggagctagtaaagatggcgttttgtactccttcacctgcgctagtaaagttttaatcattctcgtcacctctttctacaacattataataagctctttcaagcaataaatgaaacgtctcctgctcgtctttggtaaaatcccccacaattgcacgctctgaatcatccaagtgttcacccaaacgattaatcaaagccctaccttcgtcagaaatttcaacttttttgatacgcttgtctttctcatcttggcttgtgataatcatatttttttgatctaaacgcgccaaaataccagccattgtcggctgagacacttcaaattgtttctctaattctttaaaagtgtagcacttctctgttcgtttcaaaaacatcaacacccatgactgcataatcgtgatattatacggttttaggaaattattcatgttttgttccaaacgatgagctatccgtttgactaaccagccataaggagcatttgtcgggttcattattgcctccaaactcaaaaaagcaagcctctcaaaacttagccccaaaacaattttttagctaaatttcaagatttgctagacattttcatctatttaccaatagttattatagaactttgacacaaaaagtcaatagcttgctattgattttttaaaaaactaaaaaatgatatgcaaacttatccaaaattagcatattgccaatcccagacagctgcatatcattaaaaagttacccttctttttcgtgagatagtttcaatcgtttgttgctataacataatcctaccatggctaatagaaaaacagctaagccaataatgataaaactataagccgaaatactacttcttatcaaagtcatcactaaagttcctaatggcataaatagaatcgctaaagtataaatacttgaaatcactcgtcccatatactcattagcgacacgactttgaacttgactaaagaaatgaatattaaaaatagtttcaaaaagactgtaaaacaacactccagaaaaactcaaaaaaataggcaaacctgttaagggtgaaatagccaaaacagttattcctagcccgctaaaccctaatgcccataataatgctgatatcgtattaggaactcttttggacactatcgcaccgaaaatagaaccaactgccgataaactaaggagtgtcgcataagcactcgacattttaaaaatactagaactaaaaggcaataaataagtcagcattgctaagaaaagatttaccgttgtagccattatcaaaagaaaaaatatctctttttgagcaacaatatataaaaatccttcccaaatatctttaagaatctctctaaatgttaaattctgtctgatttcgtgtccaacatagtcaacatgcctaatcatcagcagacaaagaaaagaaatcccaaaagtcaaactatccacaattaaagtccaacgaatcccaaaataatggtaaataagaaatcctaatagaggtgaactcaccttaatgatttgaacagaggtttctaaatacgaattataactaacaagcttctcttttttaacaacctcaggaacataagctcgataagctgggctagaaaaagcattcgatacagcaagcagcatatttgccagaatcaaaccgtataacatcaagcgattactaggaataaatgccaagattacacacagcaaagcacaaagcccatcagtccaaagcaaaattttgcgacgcctaaacctatctgcaattgctccaccaaatggattaaggataatagcaatcacaacttcgacaatttggtaaattcccagcatcttttgtccaaaactgcccatggacgcaatccaactgctattcccataatcatataaaacatctccaagtttgttaactaccctacttgctaaaagttttaaactgtttttctccactttcatcccccttaaatcttttccattattataaatgagatttttaagggaataaaaaaattcccgaatacgagaatttttcattttaaaactttttccatatgagattgatagtgtttcgcgtgattgatagcaccagtcacttcaaaacaaaaaatggcatttttcatatcatctatcccgctaaaatcacctttagcatattttaagaagcccttttcgtagagaaaaaccgtacggtgataagcatttcgctcatttgacaataacttttcagcttctttctcaaaaaagctcgcttcctctaattccccacgctctgtacaaatctctatcatattaatcaaggtgcattcaaccaaatttcgattcgttgaaatttcagaataataatcgactcgtttcagaatttctctaaccatgcgactcatcaaaggagttggataaaaggtgtaaaaattaccaattaagattaaatcaccaatttcccagttttctttttgaaagagataatcaatcacaaaatccaaatcctcttttgacatggtacgagtttcgtcgcattggcaaatcatgcctcgaaagagaatgatattaagctttgcttggatatcggtaaaatctttttcaagtttcttttgttcctcttgaatcattttctccaagccttgaacatccttctgataatggtaaacagccatttgagacatcaatttcttctgtcccagttttttgtagttattggctcgattcatgaattcatcaagtgaaagttgaatggcttgcaaggctagaagaaatttatttagagaaatatcagactcacctcgttcaaaacgcgatagctgtgaaatggataaatcatcgcaggctacctgcttcaaagaaaaaccacgattgattcgaaattctttaaagattggtccataatcttgcataaattctcctttccccacttcaacgttgcacttattaggtcaatttcacccttcaacctgttcgctgagttcttcccattctagcatgagggtttcttgttgttcagtcaagtcatcgagttctttttgcaaatcaacgagttctacggcatcatttgtggctaacatcgcttggttgattgcttcttcacgcgcttcaatgtcttctaattgattttcaatttcagcgattcggcgtgtgagtttgcgaagttctttttggttagctttttgcgcttgataatcattagctggcgctttttcaacaatggcaactgttttttcttgtgcttcttcggctttcaaacgttccatttcttccagctccgcttttttctcaaggtaataatcataatcaccaagataaagggttgagcctttttcagagatttcaagcacttttgttgccacacggttaatgaaataacggtcgtgactgacaaataaaagtgttccgtcaaaatcaatcaaagcatcttctaaaacttccttgctatcgatatccaagtggttggttggttcgtctagaataaggaaattatcattttgcatggacaattttgcaagaagtaagcgggcgcgttcaccaccagaaagcatgctgactgatttcttgacatcatcgccagagaagagaaaagctcccagacgattacgaatttccacttctggtgtcgttgaaaaatcattccaaagttcatcaagaaccgtgtttgtacgcgtcaaatttgattgcgtttggtcatagtaacccacttcaacattggcaccgtaaattgatgttcccttgataaatggaatttgacccacaattgatttaatcaaggttgattttccgataccatttggtccgacaatggcaatggcatcgaatttcttgatatcaatattaattggttctgacaagatttggttatcatagccaattgccgcatctgtcaccgtcaagacaacatttcctgacactttatccgcatgaaaagtcatgttagccgatttttgccctaccgttggtttgtccaaacgctccattttttccaactgtttgcggcgagcttgggcacgttttgtcgttgaagcacgcacaatattacgttgaacaaagtcctctaacttggcaatttctttggcttgtttttcataatttttggcttcgagtgctaacttttcagctttcaaatccataaatttagaataattaccaacgtatctgtcaagcgaatgtggtgtcaaatcaagtgtcaccgttgacaccttatccaagaaataacggtcgtgactgacaataatcaaagcgccttgatagttgaccaagtaattttcaagccaagcaatagtttcgatatccaaatggttggttggttcgtctagcactagcaattcaggcttttcaagcaacattttggcaagcgccaagcgtgtattttgcccacctgacaattccgaaatcttcatttgccacatggattcatcaaatttaaaaccatttaaaatcgccttgatttccgcctcataggtaaatccacccttgacacgaaattcctctgacatgcggtcataatctgacatcaatttatcaaaagcatcacctgttagctctgccatttgcatttccattttacgcaaacgtgattccatgccacgtacatcatcaaaaacgtgcaacatttcatcaaaaatcgtattctctgactcgaaacggctatcttgtgccaagtaagataaagtcaaatcacgttttgtgttaatttcaccagatgttggtgtttcttcgccgactaaaattttaagcaaagttgattttccagcaccatttcgcccaaccagcgcaatacggtctttctcatcaacttgaatattaatattatcaaaaagtacatcacccgaaaacgagcgttcaattttattcccttgtaaaataatcatatgtctattttaccaaatcacaagtcgttaaactaggagaatatgaaaaaatctgccgaaatcagcagattttccgagatttattgtcagtttaagaagcatatagctcttgaactttttggatatcaacatcttgaataccgtagtaagaccctgaagattgcataacagactgttcatcgtcatcatggtcaagtccgatagcgtgccccaattcatgctctgcggtgtaaacgatacgattatgcgtatagccataatcattttccgttaaatagtaagtgttcaatttcacatcaacatgggtaattcggttcgtcaaagcatttgtctctgtctctgcaagacctgctgcttttgagctagcatcagaataatcagtcgcaataatgtccgccgacgattcatcagaaaccaaattaaaagtaaaagctcctgtggcattccaagcattgatagcttcctcataagcttcaatcaacgtttcattggtcgtctcaatatagacattggcagaattgcttgaccaacgtgcccccgaataataagtgaaatcatccgttgacaagtcttttagactatttgcaatatcatcactatttgccgaaaaataacttgtgacattattggcaatggttgaaatcgtattggctaactgagaactgctgttattggcataatatagtaaaccaaaacaaacaattccaataattacaatcgttctaaaaatagcccagaaaaaattccagataatactgataatgagtctgggaataaaaaagattatcctaaataaatttctcatacgtatcctcactttctagaatttttggattaaataccatactttcaaatcttgggcttttagtatatcaatcaaaacttaaaaaaacaagaaaaaactgcacagcaaaaataacaaatagggagacttggcttttgccttacctcccttatcttcttatctcacttccataactactggtaaaatagcagggcgacgtttggtttgatcgaaaaggaattttgccacatcatcgcggacagcccctttcaattcaccccagtcaaagctatcttgtgccaagtaattttcaacagtttgattaaccaattcagctgattcacgcagaatatcacggcttttcttgacatagacaaaaccacgtgtgtgaattttagcttttgaaacgattttcttttcgcgtttattaacagtcaaggcaacaatgaaaataccatcttctgacaagactttgcggtcacgaagaacaatattaccaacgtcaccaatcgcatttccgtcaatcatcacatcaccagctgggacacttccctcgtgattaaagccatctttaccaagaaccatgacatcaccacgtttgacgatgtaaatattttctggatacataccaacttcttgcgctaactcagcatgcgttgccaagttacggtattccccttgaactgggaacaaatattttggttgaagaaggttaatcatcaactgcaaatcacgcgcattggcatgacctgaaacattcattgtttgtgtgataagtttaaccacaccgccagctttgtaaatcaaattttcgacacgcgcaacagctgcttcttttgaaagacttggcgttgtaacgatgtaaacaaggtcgccttccttaatttgcacataacggtgacgtccaagcgccattttttgcaaaccattaatcggttcacccatacgaccagcttcaagaataatcaattcatggtcttcaaacttgtgcatgtcttttggtttgacaatcaatttttcatcaaccaaacgcaagcgtttcatacgaatggctgtgcggacaatattttcagcgtcaaaaccagttaaaacaacacgacgaccatagtctgcggctgaatcaaatacctgctgaatacgaaccaagttagaagctacggctgcaataatcacacgaccttcagcatctgcgataatgctatccatttcagcagcaacttctgattcgctagctgtcagaacattacttgtcgcattagcagaatcagaaagaagagctaaaacgccttcacgcccaatttcagtcaaacgagacaagtctgtacggtaatatttacgggcagcttggtcaaatttgaagtcgcctgtgtaaacaatatttccctcatctgtaccaacaacgatccccaaactttcaggaactgagtgagttgttttaaagaatgaaattgtcgcatctgcaaattcaatttcagtttctgcgtcaataacatggaaattattaaattttttaacattgttatttttcttaacaaaaagcttcgctaactcaattgtcaacggcgagccaaacactggcgctttaaattccgatagaatataaggcaaagctccgatagcgtctgcgtgcccatgcgtcaagaaaattccttgcacacgttttttattttcaactaggtagtcaatatttggaatgacttcatctacacccaattgttcattttcaggatatttaagtccagcatccaaaatgaaaatagagtcattaacttctaccacatagaggtttttcgcattttcgcgcacacctccaagggcaataattttaatatcgctcattacgatgttttctcctcattttattttttatacgagcaaattactttgctttttttcatacaaacggtccttgcctccaaaaaaggttagcaagtcgaattacagcattactattgtaccatattttcagaagattttcttcttttggaattagagagctcgattgtggggatgaaaaaaactgagcactttgactcagtttcactaattttaaaattctctaagtattagtcatacatcgattcataaatggtcttcagcatgattttaagttcctttttgactacctttagcaatttttcctgctgggatgatgttagactttctccgtagtgtatgccaccgttatcagaaatcatacatatgtatccaacatttttaatttttgatttagttcaaaataaactttcgtttcttcatcaagagtataagatatttcaaacttatcattcttaggacgataaaccgaaacagttttcttttgattttgaatccgtggaacaacaccacctattaaactctccttatcagcaacactatatcctaatctatctaatttttttatataccttgaattattcatcaaaacatctaactgctcataagttgttccttgttcataagctctcttaaaatcattatagcgataagctcgataaccgaaaaatgaagcaacaagtacaaggagaacaattatgacagagacaattattgttttctttctatttgacattttctttttctcctcgttctagatagtcataaaaatcattttctgcttgtttttatagttgaggaacggttgtttcaagcatacatcgattcataaatagttttcagcatggttttaagttcctttttgactacctttagcaatttttcctgctggactgatgtgatgtcaatatcattaccgttttcgtcttcaacagactgataggttaccttgaaatctttatctaattgaaaatagacattagcatcttctccatcaattattgttttaaattgaataattacatttcccaattcactaggagccttaacattaatttcgggtgttccttttgtaacaagtgaatccacacgttctaatgaaattaattcatagtcatcaacctcataaccagcgtgtctaatcgctttcacatagcgtttactattcatcaaaacatctaactgctccacaagtgtcccttgctcataagcccttttaaaatcataataacgataagttcggtaaccaaaaaacgaagtaacaagtacaaggagaccaattatgacagagataattattgttttcttcctatttgacattttctttttctcctcgttctagatagtcataaaaatcattttctgcttgtttttgttcagatgaagaacgttcattgccatgcttgatgtagctacttccaatagtctcggcagaaacaacatacttcgttacttcttttccagcagttatatttcccttgcctaaattttgataaaattcttggacacgattaacttgattcgtaatgacatcactgttatatttagtgttaattttaaaaatatcttcaacattatcagcatcgcacattctttgataggtattaatagcgtctaaatcggaattaaaatcagcatcatcatatcgcccagaatcaatatcgcccttaaaagaaatttcatatttttccattgggactataattggaatctttgttccaaaaatattaacatactgataaacattatttcccaccgtactcattacatgtgcaaccgtagccatatcaaaagcagatttgccccagcttccttccgtaaaagcagataactgaaccgcttcatggagaaaatcttttgatgtactattcgcatgattatcagataaagcttcctgtaattttgggatttttatagcagctactccatatttctcaagtaattcatctctatctttttctgcaagtgttcctgcaacaccataccatctagtagcagtataataaaacgacgcaactatccgattaaattcataaatgaccttttgatttgaccagtcttctttttgggcttgcttgataatgccttgttgtaggtcaaaaagaatggtagccgtttctctatcaaagccgtaagtctgcatgtaatcattaataatatctgctttttcgatgtcttctactgattttttagacgtgctaagagatgttaatgttgttgcccaacttaaatcatctggaatggtaaatgtcccagatgaagcattccaactgctaccgatttgagataatcctgtcgtaatttgtattttaattgtttccaattcattgaacaaagtaacagaataactatcataagatcgtaaatcatctaaaatcgtttcataaacgcgtttattcgcatgatgtccacgaattaacgtcacattattttgtcttaattctgatttttcatccgctgaaatcgttagacgcgaaatcttttgattcatgtcgtccaattggctaataaggtcttcttcttgttgaataaggcgaagtaattcgtcctcactccaacttttggtatccacttggttttgatactcttctggcaatttagcaatggcttgcgaaagagcttcagaatacaattcaccaccttgagcaagcggcaataaaacagctgaataataagctttagccgaatcataggcttttcctgttagcttctctgtttcttctgcaaagtcgctgattgctctttgtaaagcttggtatccctccacttctgcttgacaaacagactgcgtgctccttgcttgttcttctgactgctccaaagtcatattaagtcccatttcatttctccccctgtaaagataacttacgtctttcattgcggacgttgtctatctcatcttcaagccgtatctcctctttttttaaatcaacaaccgaatcaatcacacaatcaaaagttcgtgaccgaaaagctctttgctgattattattaagctcaatctctcctgcataatgactatgctctaaaatttcccaaaggctattttctaaccttaaactttccctatcataccattcaaaatcattagaaatactttctacaagcctacgattatccgtcgcttcctcaaaagcctgcaataattgacgttctttttgaactaatctatcttgactagtcactctaacttaactcccaaaactttctgcacccgcttgatccaccacttcaaaatcactagctaccgaatgaagattttgagaagctgtttcaacacttgacacaatttgtactaacaaagactttgattcttccataaggtcgtgagcttttgtatttccttgaagctccgtttgtgtatctttactagcattaccaacgtcacttaatgtttgacaagtagtcacaagctgactagcgtaagtttgtgcagtctccttatcactcctaattgtcgtcataaatcccgttctcccattattccgtttaaaattatatttattttatcataaaccttaatcaaaataaaagcactaacagtactatgctagtgctttatgaagtttttttacaacattatcttacattttaagaaaaagtttttgtataacaatgcgctgttctctcactcaaacaattgataataatcagcgattgccatttgagctttttcgtcttgattaagatctttgataattttgccgtctttcataacaatcaaacggttgccatattttagagcgtcttccatgtggtgtgtaatcatgagtgctgtcaagtggtcacccgttacaaattcatctgttaaattcatcaaggatacactcgttttagggtcaagggctgccgtatgttcatcaagtagcaacaattctgggcgttttagcgttgccatgagcaagctaagtgcttgacgttgccctcctgataaaagcccagtcggcgtttccaaatgcttttcaagaccattaccagttcgtgcaaccaacgcttgaaattcatcggtaaacgcatgaatttttcgtggcaaaaggccacgtttttcaccacgatatttggcaataagaagattttcagccacagtcatacgtggtgctgttcccattttagggtcttgaaagacacgcgccaaatagttagcacgtttttcagcaggtaaatgcgtcacatctttgtctaggatataaatgcttccgctagtcaacatcaaagttccagcaatcacgttaaaaagcgttgacttcccagcaccattcccacctaaaatcgtcaaaaaatcatgttcataaatcgtcaaattcacgtcatcaaggattgttttgacctcgtcaagaccgttattaacttgaacggtagcattttttaattctacaatttttttcatcgcgataaggtcactcctttgaaaaatttatttttaagaacgggaaccatgagacagagtgccaagacaagtgcactaaacaatttgaggtagttcgtattgaagccaagggcaataactgccgtgattaagaattgatacaaaattgacccaacaacaatggcaatcaaacgctctaaaagtgttagaccagttgaatacaacacttctccgataatgatactagcaagtccgataacaatcacaccaattccttttgagacatcagcgtagccatcttgttggctgacaagagcacctgacaaagcaatcaacccatttgaaatcgtaagccccataacttccatgcagtcggtattaatcccaaaactttttgccatatcacggttatcaccagtagcaatataagcctgaccaagtcgtgtgtataggaagaaaatcaatcctgaaataacaatagcaaccgctaaaagagcaataatcagcaagttagtgctgtctgcaaacgggaataaatcttgcaatgttttaatatcaagcaaaccaagattagcacgtttcataatcatgagcatgattgagttacaagaggtcatcaccaaaattcctgctaaaatggttgggatttttcctttggtataaagcaagcctgtcacaagccctgcaaaacaccctgcaagcattcctgcaagtgttgctaaaataggatgaaaaccatggttcatcaaagtaacagccactgctcctccaagcggaaatgagccttctgttgtcatatctggaaagttcaagattctaaaggtaaggtaaattcctagaccaagaattccccacaaaagcccttgtgatactgacgaaataatcatctgatttttctccttcttccttaattatcatctgcctcaacagccactgtggcttctgaaagaacactatctggtattgtaataccaagctcttgtgcggctttcaagttaagggttggcgtccctgtattgacaatattgacaggaacctctgacacttttttacctgctaacaatttaacagcaatttttgccgtttctacacctaaatcatactgactttgggcaactgatgcaatgcttccttgctctaccattgtatcaacgcatgaataaatcggaattttcgcagcattggcagcattaacaaccgtcgtaaaggctgatgcaatggtattgtcttgtggaacaaagatagcatcaacttttcctgtcataaccgacattgttgttgtgatttcatttgttgacggcacagcgtattcaatgacattaatgcctgcagcttcggcatcctctttaaattcagcgacttgtgatactgaattatcctcgctactagcatataaaacaccgattgtcttggcatttggtgtaatctcttgaatgagctctacggtttgttcaatcggaacttggttggaaacccctgttacgtttccttctggttcttcaagatttttaactaattttgcaccgactgggtcagaaatagctcccataacaactggaatatcactcgttgctgacgccaaaccttgtgccgctggtgttgcaataccaatcaaaacatcgtttttagcattgactaactgcttactcatcgtttgaatcttgctttggtcaccttcagcattcaacaccgtaatttcagcgttatcactatcatagccagcctcagcaagaccgtcctcaattcctctttcaatctcatctagagcatcgtgcgtcacatactgcaaaataccaattttaaccacatcatttttacttgaatcgcttttagtctggtcataaatcatcgaaccagcaactaaaataacaagagcaataagggttccaataagtgctttatttttcattcttttctccgttggttttaaaatcttaacattatctatcagcagggtgagtcaactaaaaagaaaagcgtctagtaattgcttactacacgcttttttatctttgtaactaagattagcgcatagatactttttagaagcactccaaaagtcgtatctatgcaaacacataaacacaactctacttacgccaactttgccaatttgtaagagtttgtgtcatgttcatcttagcttcctcctgtgtttttttataattatatcctaaattttggaaatttcaagcacttttcgaaattttctcaatttatttcttgttacttagtgagatgttcaataaaacttctgatgactttaggaagggtgtgataagaatatggtttataaattctctctttccaagtatgtgcaccaatgccgtaaacacctaaatcaacagcaggaatatcaagtgttctaatggtatcaactggcaatgggtaaatgctatccattaacggaaaattagctttaagcttgttaatatcttctgtcgtttcccgcatggcaaggtaacttgaatcactcaaaaatgggaaaaaacgacgtttgacaaaattttcttctggaaattctgtcatcatttgttcgagtgcttggtcaacctcgctatcagaatccgtataattgtgtgggcaaaatggcggtgctaaaaagacaactacctttgcttcgtctgattgtgttttagcttctagataatcaattaattgaaagccgacttctcgtttatcataatctttaatttgacccaaaaagcttgaaatgagcatcttcgtgtcatagccttttttcgctaatctagcaaggtattcatcaaatgtcattactacaatgtcgtggctgatattactgtgaatatggcttctttctgtgtagagtttgaaacgttcctcatagtttgttgtcacttcttgaacagcttctttactagcagctaacaaagtctgcaaaaccgcatcagcactcttttcatacaaaaatgtattgaaatacagattggctcgtttattcgtttgcacattgtagaaatctttgcagtcacgttgcagtaaggcagaacttggcaaaatttcctcattggaaatagtttcaaccaaatcaagattggtattgattttcagattgatagcacttgagataagcgtcgcatcaattcccattaaacagcttccaacatgagtttcacgccccttgatgtaaaaacacgttagcatttttccagctgcacctgtgtaaatgtactttttctcatctccttcatacgacggtgaaataaaatcagtgtttatggcagctttgaaatcgtatccctcttgacgcaaacgcaacaactcactagaagcctgaatggcacctgtatggtcattttcttctacggcatttgtcatcaaaagcagattgcagggcaactcatccatgtgttccatataatagaaaatcgttgcgatattgactgcatcacctgatttcatgtcaagaattccacgtccaaaaagccaatcaccagattgagcgtgtttttgaatgaggggatcttcgtcataagtcttgaaaaatgcttgcagtgcatcagagtcatgggcgatttcttttaaaggaccataatcttcaacgccaaccgtatccatgtgagaatgaagaatgacagtctgctttgttccttcttttttcaaaagagcaaagttatttttacgcttcaatctatcttgttccaaagcttgctgccagacacaccttgggtgttctttaaaataaggtgctgatttgacgagcttataaatggcatctgcaacggcaacttccccacttgttccattaactgaaagaatagagactaagtattttgaaatggcttcgatacgttctggcagattataggcttctatggtttcaaatttcatgatgatactcctttaaaatcgcgacagcatttttgacggtttgtgtttgcaaggtatcaagactctcttgactgtaaaaagcagcatgcggtgtgatgagcacattatcacgtccaataaaaggattttcagaaaggtctggattctcactttcaaggacgtctaatcctgctccgataacttttccctcatcaagggcttctgctaatgccaattcatccactagactgccacgcgctacattaataaaaataatcggctttttcagccccttgaaaaacgctcggttaaagaaatgtttgttagcagagttcgcaaataaatgcagactaatgacatctgcttgcgcttgtatcgtttcaatcgaaaccaatttcacgcccaattcatcagccactttttctggtaaaaatgggtcgtaagcaataactgtcatcccaaaactttgagcacgtttggcaacagcttgtccaatacgccccaagccaaaaatagctaaagtttgcgaggacaagcgcttcacattgccaactttctgataattccaaaagcctgcttcaatgtacttgcgatgtaaaaacagtttttgattgagcgctagcaaaagagaaatcgtatgattagccacatcttcagttgaataagcacctaaatgtcgcacagcgattcccaacttctcagcataatcaaggtcaatcgtattggtgccagtagcattcacggcaatgcctttcaaatctggaaaatgctccaacacagtctctccaagtggcaagaaagctgtcaaaaggacatcaacacctgacattctctcgataaattcatcctcattaacataaggataaaccgaaatctcgctatcagcaggtaaaagttctttcaaaagattaacttcaatgctcaaatcacgctctgccaaaacatttggataatcagaaattaacacttttaacatggtctttctcctttaaaacggcatcaatttcactcactaaacggtgcatttcttgttttgtcccaattgaaattcgtacaaaatccttgacttcttctgtcgcataatgacgaatcaaaatatgacgagctcgcaatttctcgtacaattccgcaccagaaatcactttcgaagacgcatagacaaaattggttttactgtttaacaccgtgaagcctagaatgcgtaaggcagatgttaaaaaatcacgattttctatgatttctttgacgtgtttttcaaaatgaaattcatcctcaagactagccaaagcaacttcttcttgcaaaaggctaatattaaatggattgacagccatttttaaagcttccatatctttgatgagctctttacaagccacggcatagccaatacgagcgccagccaattgacgagattttgaaaaagtccgaacgacaatcacgtttgaaaaatcattgacaaggctaatggcggtctctgattcaccaccaaaatcaatataagcctcatcaacaataaccagtcgctctgggtgcgaagctaccaattttttgatagcagataaaggtttgagaaaacctgttggagcatctggattcaccaccaaaactgcatgaggaagttcttcataatctgataaatcaacgtgtaaatcctttgttaatggcacttctaacgcttcatacccaaacgtatcagcatatcctttgtaaaatggataggtgatttttggaaaggcaattttgtctccgcgttcaaaaaaggttctgaaaattaaatctaaaacatcatctgcccctgtcccaacaagaatatttgacatttcaagagagtgtaaatcggctaacttctgacgtaatttactttggaaaggatcgttataataatttaatttttgagcattttttaacacctctaaaacacgaggactaggctcttgcgaactttcattggcatttaattttaaataatcatctccaagttgttcaccaggattataagcgacaatagtttcaaatgatttagctaaaaatgttgacataacaaactttctaaattgtttttaacgtggcaatccacttctacaaattaagattaacagcaggtatttgattaataacgctctagcggaaaggtcatacaatgcacgccaccaccagcttttaatagctcggtaatatcgacttcgataacttccattccctctttgcgcagcgcatcattgataaaagtattctgcttcaaactcatcacacgattatcaccaagcgcttcaacgttgtaaccatgcttaaatatcatttcttctgtgccagcaatcactttgatgcctttttcttttagcaaggctaaaaaatcatctggcaaaccagcttcataggcaatggcaagctttggagctactaggttaaaacacatatccagatgaagataatcaggattggctttaacagcataaaccttataaccataaggttctaattgcttgcggatttcatcaacacctgtaagattcgtgcggtcaatcacaccaattgcaagtgttttttcatcaataaaagcaaaatcacctccttcaaaatagccttcactcacttcagcaattttaggaattcctaactcttccatgattttgcgataatgagaacgttctaaaaaacgaatagatttcttaaaatgtccaagaatataaccctctttgacattgccaccaaaatctctggcaaaaaccgcattcggcatattctctgttgaagttacttgaaccacttctaccccattttcttcgtaagccttcacaacactttcaaattcctgcatcatcttgtcgtgattcaaaggtttcgtatattgttctgaaatcacattaattggtgctgcactcactaaaaattcaggtttacatagtagcactttgcgcaagcgacttgtcccatctacaactgacataaacattcctctttctattcttctgttgtatttttctgtgctaattcactatattctgccatccatttatcaaaggtgccgtcttttttgtcttgctcaattaattggtcaacatattctttcaaagaactatttcctttggttaaggccatggctgtttcggttgtccctggcaattcaatatcggcatatgttagattgtcattgcttgcgatgtattggtcagcaaccgtgtcatcagcaacaaccgcatcgactttcccttggagtaaatttaagaaaacatctggtaagcttgataaggcaacgatttgttgaggtttaatatcatcctcaaccacatcagcttgtgttgttgatttttgcacagcaattgttgttgacgccaaactttcaattgacgtgtattgactggcgacctcttttcgaacaaccactttgttggtttgcttcacataattttcagtaaaatcaacggatttttcacgttcttttgtttttgtcattcccgcaatggcaatatccgcatttccagaggtaatggttcccaaaatagaatcaaaattcatatttttaacgactaatttaacctgcaatttatccgctaattgttgggcaaaggcaatgtcaaccccaaccgcctttttgtgtcctgatgtcaaatcgtaaaattcatagggagcgtagccgatattcgtcgcaacaacaagttgtccagattctttgattttctcaacactagaaaccgtttttgaagctccaccatgattcaaagcgaaaataccgacaatagcagcaatgattgcggtggttaaggtcaattttttccagcttgccttgatagtttgcatcatctgacgaattttttccgatatggttagtggttcttcggtgctgcggctcattttcttttcgtaatgggcaacaatgcgcgttgttgaaaaggtaaagagcagataaacaataccaaccgcgataacagcttggaaaggtttgtaagaaatcccttgaatcgtgcttgctgtgaacatcaaatctgccaccccgataaccgacgcttgcgaacttgatttgatattattggcaaattcatttcccaaggttgggagaatatttttaaatgcctgtggaataatcacataacgataagtctgaaatttattaaaaccaatacttcgagcaccttcaaactgccctgaatcaacagcttgaatccctgatcgataaatttcagcaacaaaaaccgattctccaacggttaaaccaatcagagctgaaatcaaacggtctaaatcaacgccaaagagcgaaccgtctggaacattgaaaccaagttcaggtaagccgtaaaagaacagtgacaaaataaccagcattggaagaccacgaaccacttcaatgtatagcttcgttagcccactaatcaacagattatcactcattcgtgccgcagtaacaacacctcccaagacaagtgctaaaatcattgaaacgactgataaaaacaccgtcatcagagcaccatctaaaataaaactgccataattttgtagaaaatcaataaccataacctctcctaacacttacaaaatttgctttaagaaatttgcgacacgctgatttgggtaagaactattaacctcttcaggcaacatatcagcaattaattccccattttcaagaaagacaattcggtcagccacttcctttgcaaaaccaatttcatgtgtcacaataatcattgttgttccactcttagcaatagctttcatgacttgtaaaacctcaccaaccatttcagggtcaagagctgatgtcggttcatcaaataaaataatatcaggctccatggctaacgctctggcaatcgccacacgttgcttttgtccacctgagagattttcaggataagcatcccatttatctgataaccccactaaatctagcaagccactcaccttttcttgcagtttttcaccgctttttcgatgtagtttttcaggaccaatactgatatttcgtgcaatggtcatattattaaagagattaaaatgttggaaaaccatattaacacgttctcgcaagagattatcattcatattcatgtcataaatattttttcccatgacagccatttttccgccattaatatgttccaatttattaatggtacgaataagcgttgatttgccacttcctgatgggccaatcaacacaacgacctcaccttttttaacagaaagattgatattttttaaaacttcctgcttgccataactttttttgattgccttcatttcaatcatgtattttgcatttaaatcgaaatttgctagttcttcctctaaaacaaccatgccaatgacctctttctcaattgatgtcaatattttataattttcagaatgttttttcaatgctatatgttagattttctaacatataagctattttttgtcttttttctaacattttttcgcaaaaaagtcatttcagcaagtgattgaatataacttttctttatgatatgatttaaaatatgaaatctagttataaattatccatttttgacttcaaattaatcaaagacatttatgaaacacaaagtttttcagaagcagctaagcttaataatatcagtcagccagctgtttccaaacgtgtcaaagaaatcagcaacaatttatgtgaggttttcttacgtaaaaataaaaaaatagcattaacaaacaaaggaaaagaaatttatcactttgctaatcaaaccctacttgcttataatgaccttcttgataaattaacgtccgattttgagcaaaccattgtgcttggttctgatatttcctatctcaagacctttttgtcaaccattcaaaaaaatcttcctgaacaccataaattaagcgttcagacttacagcaattcacgaagtatttttgaagctcttttaaacgaccaaatagacctcggaataatgtctggcagttatacccaaaaaggtgtgcttaaaatccaacttcgtgctgataaattgaccattgtcggtcaaaaagaattgattgaagcctttgataacggtcaagaaaccctgtttttgctctatcatatgactagtagttatcataattttttgaaggaatttatcaaaatcaaccaacttcctacacagcaccacctttccattgacaatttatcgctcattgaacatgaggtcttatcaggtactgggattactatcgttagccaagacattgccgaccgtatgctaactaatgacaatattgtcatcagctctcaaaaattcagagacgtctttatcaaaacttacgccattataaaaatggacaacacctactaccaagacctcattcccattatccaaaaactaaaaaaataacatcagcaactttcccatgactaaaatcccagttttcgccaaggatatggtataataaagggattgaacacatgagattagaaaggagacgtcgtaagatttcttagcatttttgattgactaatcttgcggcaactttaatcatgtcatttgatggtttttttctacaccatttaacaaaagaattacaagaagagctactttacggacgtatccaaaagatcaatcaaccttttgaacgtgagttggttttaaccattcgcaacaatcgtaagaattataagctcttgctttctgctcaccctgttttcggacgtgtgcaaatcacgacggctgattttcaaaatccacaaaccccaaatacctttaccatgattatgcgaaaataccttcaaggggcagtcattgaaagcattacacagattgaaaatgaccgtattttagaaatcgcattttctaataaaaatgaaatcggtgataacatcaaagtcaccttggtagttgaaatcatgggcaaacacagcaatattattttgattgataaagctgaaagcaagattatcgagtcaatcaagcatattggtttctcacaaaatagctaccgcactatcttgcctggctcaacttatcttgcaccgccaaaaacagaggctaaaaatcctttcactgtttcagatgaaaaattatttgaagttttgcagacagaagatttggcaccgcgcaatctgcaaaaacttttccaaggcttgggacgtgataccgcggaaaatttggctgctcagctcagcaatgacaaactgaaacaattccgtgctttctttgctagaccatgtcaaccaaatatgaccgataaatcatttgctgctgtgctatttgacaagagcgataagcaatttgacagtctttctgaactcttggattttttttatcaagataaggctgaacgcgaccgtgtcaatcagcaatcaagcgatttgattcaccgtgttcaaacagaattggataaaaatatcaaaaaacttggcaagcaagaaaaagaattattagcgacggaaaatgcggaagaattccgccaaaaaggagaacttttaacgacctatctcacgctagtgccaaacaatcaagaccaagtcgaattagacaactactacaccaacgaaaaaatcgtcattgcgctcgataaaagcctaacacctagtcaaaatgcgcagcgttatttcaaaaaataccaaaaattgaaagaagctgtgaagcacttgacagggcttattcaagaaaccaaggatacgattacttacctcgaaagcgttgaaacagcattgaatcacgcatcaatttctgatattgaggatattcgcgaggaattagtcgaaactggatttgtcaaacgtcgcacgcgcgataaacgccacaaacgcaaaaaaccagaacaatacttggcttcagatggtaaaacgattatcatggttggacgcaacaacctgcaaaatgatgaattgactttcaaaatggcaaaaaaaggagaactttggtttcatgctaaggatattcctggtagccacgttcttatcaaggataatctcaatccaagcgacgaagtcaaaactgacgctgctgaattagctgcctactactcaaaagcacgtctgtccaaccttgttcaggttgatatgattgaagctaaaaagcttaacaaaccaactggtggcaaacctggttttgtaacttatactggtcaaaaaacgcttcgtgtcactccgaccgaagaaaaaatcaacagtatgcgcatgacaaaataaacaaaaactcactctaaatcttcctttcggttgatttaaagtgagttttcttattttttactatcttcccttaacttagaatgtctgtatccatatccaaaatagatgagacttccaagaataaaggatgcaatgaaaccataccaagtaatcgctttacattgtgtcatcaatgataggcaaataacaatcgataacagcggtaaaaatggcacccaaggtgttctaaattcttcctcttttggttcgccaaaatctttgcgaagtttaatcactcccagagctaacaaaatcagataagccaaggttacaatattaaccaacaaggctaaaatttctaattgcaacacacctgaaaagaacatggttaccaaaccaacaaaaatcgttgctttcttcggaactttactcttcggtgttaattcttgaaattgttcaggcaaaagaccgtcacaactaatattataaatcatacgtgttaaagcgtacatcatggaaatgcagacggtaacaagtgtcatgataacaacaattgatacaaaatttccgataaatggaaaaccaatgctacgcaacacatacggaacaacatccgtaatatttaattttgaatagtgaacagtgcctgttaaaatcaaggttaccgcaacatacaacaaagtcaccaagccgattgagataaaaatgccttgtgggattttcttttgcggttcctttgtttcatctgctgccattgaaatggattcaaatcccagaaatgcaaagaacatcaaagaagctcctgccataatcccaacttttccgccataaatttgaccaaaaccatatggggcaaaatcactccaattagcagtattaatcgcagtcaaccccaaagcaatgaaaatgagtaaaacggctaatttgaaaataaccaaaatcgaattaaaccttaacaccgtttgaactcccaacaaaacaagggcagtcacaaagaataataaaataactggaacaatatcaatataagttccgtttttaggattgaatggaccacttaacgctgtcggcaaactaatgccaaacgttttcaagaaagctttcagatactctccccaaccagaagccgctgttgaaatcgcacctgcaaattcgataatcataaaccagccagcaatccaagcaggatattccccaaaaacagtatataaatagcgataaacgccacctgagtgaggtaatcgtgatgaaaattcagcaaaaaataaagccgatatcgtcacacaaagagcagcgataagaattgatatcgtaatagcaggacctgcatattgggcagcacccactcctgttatcgtgaaaataccagttccaacaatcgagcccacccctaaaaagataagctcagctagccccaaacgtcgttgcaaaaaactcctcttttgcgtcataggggtctttcgaaaaatatccatacattctcctgtttttaaaaaatagtcatacaattcttaaaattctatcaactttgatacaaaattcacatgcacaacgttttctattttaggacaaatatgactaaaaatcaactccttagattataaaaagggagtgggacagaaatcggtaatttcgaagaaattcgatttcgtcgtcccacccccgcaaggttgagtagggttgtaaaagctgatttatcagcgcattagaacccactcaactactgcgtcttgtaaataataactatataaacaaagaagctgagcactttttgtctaagcttctccaacttataccaaataaacggttttattcgctttttgtgatgtcttctttcaattcatccatattgaatttcgcaaaaaggtatttgcggtcttggactgggaaacgttggtcaagttggtcaactggtccaacttcaaccacaccttctgaaatgacaaagtccataatatgaccaccaaatgtgaaatcatcagaaatgaaatgcaaatgataacctgccgagctaacgccatggaacatttgtggtgtccaaatcccaacaatcgtacctgaaatgttttcacgtgtgtattctggttggtgcgttgcgacatccgcaaacttgatatcaggcgctgattttggaatcatacgcacatgcatttttgcaaatgttcctttaatcttaatcgaacggaatagattaacaccgtcataataagattcaatacgtttttccaattccttgtcagtcattgcaaagcgttgcttgaaaatcacttcagcttggtgaggcactaccgctgcataaggcactttgacatcatcagaaacttccactacttctgctttcccttcagaacctttggcttgataagctttaccatcaagaataatcaactctccatcaatagaatcaagtgtcccaattcccaaatcaccgtgctctaaaagctcaccaatagttaatgtcccaccgtaaagtccagacataagggcacttaatgtattatattgaaaaagtttaattgcttctgacatattctccttcactttcgtcatcaaaattaaatagtatctcttctagtattattttattgccatatggttaaaaaatcaagttaatagaattcgtctggcaggattgtttcgccaagtttgatattatctttgtagtcgattggaatatcaatcaaaattggaccattgcttgcttcttccaaagctttcttgagtgtttcttcaaatgaaactttgctgtcaacacgataaccttttgcaccaaaactttctgcatatttaacaaaatcaactggaccaaaatcaacgcctgatgaacgaccgtatttcatttcttcttggaattcaaccatgttgtatttgccatcattccaaatgatgtgaacgattggtaaattaaggcgtacggcagtttccaattcttgcgctgaaaagaggaagccaccgtcaccagaaactgaaataactttcgtatttggacgtacaagcgctgctgagattgcccaaggaagtgcaacaccgagggtttgcattccatttgagaaaagcaagtgacgagcttcgtatgatttgaaataacgcgccatccaaatgtagtgactaccaacgtcaacagtgacagtcatatcatctgttgtattttcttgtaagacatcaataacatcaagcgggtgaaccaaaccttccttggaattacggtcaaatttgacatcttcaacaacatttttcttcagattttgcaaataatctactgatgcttttggcaaaacataaccattaacggcaggcaagagcaagtcaatcgtatccgcaatgttaccaatcaattcacgttctggttggaaataagtatcgatttcagcttgcgcaacgtcgataacaataatacgagctgaaatttcagcattccaatttcgggcttcatactcgattgggtcataaccgatagcaataacaaggtcagcttttttaagcaacatgtcacctggctgattgcggaaaagcccaacacgtccaaagaaagtatcttcttccaattcacgtgagacaatgcctgcaccttggaatgtttcaacaactggcaatttaaccgcttctagcaacttgcgaatagcattggtaacagcacgtgttgaagcaccatttcccaaaagaagcactggcaagtcagcgttacgaatcgcttgtgctagataattgacatcatcaactgatgcagaaccaagttttgggtcagttagtggcttaatcgctttgaccgaaaccaaactatcagtcacatcttgtggaatagacacaaagctagcaccgcgttttcctgattttgccacacgataagcattagcgattgtttcagaaagtgtgtttgggtcatgaacttctactgcatattttgtgactggctccatcattgccacatttttcatagattggtgagaacgtttcaacaaatcagaacgtttaacttgtcctgaaatcgccaaaacagggtcaccttcatccgttgcggttaccaaacctgtcgccaagtttgaaaccccaggaccacttgttgtaatcacaacaccgggcgtacctgtaatacgtccaattccttgcgccataaaagcggcattttgctcatgacgagcgacaatcaattttggtcccttgtcctcgagtgtgtcaaacacacggtcaattttagcacccggaataccaaagacataatcaatgtcatgattaatgaggctatctactactaaatcagccccatattgtttattattgtctgtcattttatctcctatatgtctttagatgactcattcattttactgtcgaaaagcatcaaaatcatagctggatttggtgtaagaatcagtcaaatctaaatcacaaatttttgttttttcacaaatatgattcaattataccatagttttacagaaagtttgtgaaaaattgtttgtgaattttttctttatctttctttgaaataattttaaataatctgaaaatggttctgctctaaaataaaaatatcaagccaattttagacaatctgtcatcatatcacaaaagcgaatcgcttctgataacataaccgattcgcttatcactgcttatattgtctaaaacatttcagaaagaatgatagttgactgcattacttcattcttctttgattattttttagagtacatatcaaaacgtcctgtatgaagatgatagatactttctgccccaggaatttttggcaaaccaagagaatcttgacgcgaaaatgcttcaaataaacctggtgtccatttgatataatcaagtgtttcaggactcacttcacttaaaatcgtatctccttgacccaacatgactttttcagcaaataatgggtcaaccaaagtaccacgtccaacagcaattaaatcaccatagttttcaaccgcatcacgcgcagcttcttcttcaaaaacaccaccaaccaacattaattttgtctcatcgtcaagaacttctctgaacaattctgcatatgtcttatcaacgccttgcggtcttgaagaataaccatcccaaagcgataggtgaatgtaatccaattgatatttcaccacttctgcgataagttgaacagattctttgtaagtataaccaatcgcatcaccatgaatttcttctggactaatacgataaccaacgataaagtcttgcggtgcttctttggcaacaacgtccataacctcagcaacaacagctagtggaaacgccattctcctttcaagactaccaccccatttatcggtacggaaatttgataattttgagaagaattgttggataaggtaatgattggctccatgaatttcaacgccgtcaaacccagctttaatcgcacgtcgagtggctttgccaaaatctttgataatatcatcaatttcgtctgctgttaattcacgaataggataatctaggaaactaaaatcaacctgacttggtgcaacgacatcttgcccgctaaccgcttgcccaatagctgcgcgaccgccgtgatgaatttggagaattgccttattgccatcctttttcaaagcttgagctacttgacgcaaaccgtctaaatgctcatcagaataagcccctaattgttcaggatagccaggcacataagctggaccaccatttggactaacataatgaaactctgtaatcaaaagccctgctgcttttgaacgtgcattgtaatagcgaagcgtatcatctgaaacaaagccatcacgttttcctgaatgagtttgcatcggtgacatcgccatgcgattatttaaaactgcgccatgacgcaaaacgactttgtcggttaattgatttgacataaaatgacccctttttctgtattgtagaaaattattgaaaactttaaaacgatatatttagatttttcgatatgttatttcaaaaaaatttttctttttttacaactctttatcgataaagtcacgaaggtgtttaagcgttacttcgttacgacgataataagtccattttccgattctggtagcaatcaacagattagctttttgaagcattgaaagatagtgggatgtcgttgactgtgttagccctaattgtttttgaatttcaccaacacaaacgcctacttctctcatatccacattttcctcatggacaaaatatttttccggatttttcaaccaaaaaaggatttgtaatcgatagtcattggctaaggctttaaagatttctacattttccatgattctattatatctatttttctcgatatgtcaatagaaaaatcaaaaaatttatcttgtaaatgataactacacaaaataaagaagttgagcacctttgtctcaacttctactgaactgattacttttttcgtcttgttctaacaaaatcataaatggtcatcacgataaatccgacaaatacaataatgatattgcgcaatgggtcgccactatggtcaaaaatacttaacaaaacaaagataatgatgaccgtaatgagattactgaccaagagatttctaaaattcattttcatttaaaaattccaccatattcacatcatctggaaccaattgcaaataacgttctgcaacttgatgagcacgttccttttgtccaaattcacgtaaaatataagcataatcttgcaagaattctggattatccgctaaatctgtcgccaattcatcataaagcttgagcgcttttttatcagcttccaaggcttggtaagctttagcgatattccattttgttaggacgctatcgatattatcacgtgacaaagcaacaacatcttcataacgctcttcttccaaatacaagttggtcaaacgcatcaagacatcttcatcatcaaccgcaacatcttttgctttcaaaagatagctttcagcttgcttagaatcatgcaactcatatgacaattgtgatgcagcaagcaacaaattggtatcaaattcgtttttgctcaaacctttttgaactaggcgaagcgcttcttctgttttattttcctcatggagagattgggcatagacatattcatagccctcaaaatcaggattcatcgtatccaactgcttaaagtaaacatttgccttttgatactccccttggtcatacaaaatagtggctaattcaaaaattgttccgtcgtcgtattcaatttcaatcgctttttcaagaaattcaatcgctgcctcaaatttcccaagactagcataagcacgaccgatacgttgataagtagaaatccccgttaattcaaggatttcacggttatccaacttagcgtattctttgattgcttgattaaaattacctaattctaactcaatttcagccaaaccaaaaataaccaatggttcatcgctgatttcactagctagcaataatttctcacgcgcaacatctgtcaagccttccatatcgtaaatatcagccatgacaagcaaagctgacaaatatgcttcgctttctggtgaaatggcatccaaatacaagaaagctccctcaatatcaccatcttcagttgcaatctgcgctaggttaatatttacttcaggataactctcacgctcctgcaaataaatttcccttgcctgtggcaaaaaaccaatgctttcaagatattctgccaattccaagagcgtctcagcatcatcttcttttaaggcgcgtttaaaatatttatcagcatgctccaaatcttgtttttgaatcgaagccaccattttttcactattcaacatctttagctttttcttccccttctataacaagtacttcttcctcatacaaaccactgatacgtttgtaccattcaaaaatttctttaacaacaactttgattgaagcgtaaattggaatccctaggaaaacgccccaaacaccaaacattgacccagacgttagcaaaataaacatgatggtaatcgggtgaatgctcaatttgcttcccagaaccaaaggtgaaacaaaacgtccctcgattgtctgctcaacaacaaatgttatcaaaactttaatgagcataatcggaccttggacaactcccatgataacgactggaaccatggcaagaaagcttccaagataaggaatcatattaagaaaaccagcgataatcccaaaagtagccgcataacgcaaaccaataatattaaagaaaatcgtaaacataataccaacaacaatagcaaccgttacttgtccttgaacataaccagctaattgtttattaatatcaccgagaacacgtgaaattgggcggcgcatccgtgtcggaagtgtttttaataagccttctttcatcttaccgctatcacgcaagaaataaaataagataaaaggcgacataatgattgctacagttacacgagcaatcgcactggcaaaatttgatgcccagtcaatcgcattttttgaaaagctttccgcataatcaatcgctttcgtgctcacatttgacagcatttcttccaattcttcttgataattggctagccaggggctctctaaaaatttattggcttcaacattaatgcttctaacataacttggtaaattctcaacgaaagacgttaactgctcttgaatcgttgggataaagcttgccacagcccagattaacaaagcaatgataatcgcaaacacaataaaaatagaagttgtccgactaacgccacgtttctcaataaaatcaaccaagggtttgattaaataatagagaattgccgaaatcaccaaaggcaacataataatagctataaaagatataatcggcgtaaataaaaatgaaatcttggtaaaaagataaagggttaaaaacacaagaaaagtaatcaaaacagcgacaactgcttgattatttaaaaaccatttaaaaaaccaagaatctgtaaatttcttctcttgatgatatttcatgaaaactcctcactactgtttgcaatcaatgattaaactaatttccattatagcattttctattaaaatcaccattttttagaatgatgcgctcatttatcataaaatgtcacgcttttatcaatcaagcgctgttcgtcgtcataagtaaatttggctgaaaagaatggcacatcatccaaaatccatttaaaaatttcgtagtcaccctcccaagtcggttttgatagaacttggtcgtaaggcacccactctaaagttccttcacgtgactcttcatcagaaatcaattctccctcaaaatcggttaccttgaaaacataagtgtaccaatcatgccctggtgtgaattctgggaacgtaatcactcccttgaaatccatttctttaacagtaaaatgcgtttcctcgaaaatctcacgtttcgcacattcatctggtgtctcgcctgcttctagcttaccaccaacagaaatccattttccttcgtgaacatcatttggtttcttattgcgatgtaaaagcaaaagcgcttcaccattatcaatataacaaatcgttgctaattttgtcatttctctcttctttcttgttttattctattgtaccagaaaactaaggacaattcttgaatcaaaggttaacttagacggcatttcctatttttaaggggataaaaagcacatagagctatctaagtgcttaaaaatataatggcatcttggtattttttcagacgtttgatgtcgtttcgagtgccctgagccagccttgataaatctgaattgtgctttaaatccgccaatttgacaacacgtgctaattcatttgttttaacaattttaagatattgcttgtacgattgcccgtcttttctagtcaataaatcaactgcttttatgatttcagacgagaaacctgcttcttctaaatcactcagctgataaggagtgtcttctatcacatcgtgtaaataggcaacaattttttcatcatctttcgtgacaaacgatgccaccgtctcagggtgtaaaatatacggcgcaccagctttgtcaacttgaccgtgatgtgctcttttagcaatttcgtgagctaatttgacatcatctttcatcactgttcctcctttaccgaaaaaattaaatttattataccatttttctacccttacgttgcccccaaaaatgccccaaaaccacaaaaaaagcctgtcgcacaagctgtaacccttgatacgataggcttttatgattatttgtcaagaactttttgtgttttagcgtagttagcttcaacagcttctttttcagctttccaccaatcttggttatctgtgtaccatttgattgttgcttcaagtccttcttcaaagtttgtgaattgaggtttccaaccaagttcttcacgaagtttagttgaatcaatagcgtaacgaaggtcatgaccagcacggtctgttacgtggtcataagcatctttgggctgacccattttttcaaggataagttcaagaacttctttgttgttcttttcaccatcagcaccgataaggtaagtttcaccgatgcgtcctttagtcaagatagcccaaacaccagttgagtggtcgtttgtgtgaatccagtcacgaacgtttttaccgtcaccgtaaagttttggtttaattcctgacaaaatgtttgtgatttgacgaggaatgaatttttcgatgtgttggtatggtccatagttgttagagcagttagaaatagttgctttaacgccaaatgaacgtacccaagctttaacaatcaaatctgatgcagcttttgttgatgaataaggtgaacttggattgtattttgtttcagcagtgaatttttcacctggtccttcaccatgtcctggaaggtcttcacgaagtggaaggtctccgtaaacttcgtcagttgatacgtggtggaaacgaatatcgtatttacgagctgcttccaaaagtgtgtacgttccaacaaagtttgtttggatgaatgggcttggatctttcaatgagttatcgttgtggctttcagcagcgtagtgaacgatagcatcagctttagcagctaatttatcaaccaattcagcatctgcaatgtcaccaacaaccaattcaacacggtcaccaaggatttcttccaagttagcacggttaccagcgtatgttaatttatcaagaacagtaacgtgtacgtctgggtggttattataaacatagtgtacgaagtttgaaccgatgaaaccagcgccaccagttacaatgatatttttgtattcagacataatttaagatacaaagggacgtttcgcttgcgaaaaatctcgtggaaaaatagaaaatccgacacagacgactagcgtctaggaagatttatcttttttctcagagatttagtcccgtgttcagttttttaataaactgaacattcctttctgatttattttttattaggtattacaaatcttctttgcttaatggtttaacgtctttaagcaatgggtgatttttgtcagcttcagagacttctgctgcttccaagttttcccatttaatgcctaatgttgggtctgcatagttaacaaaggcatattttggtttgagttcaagtgcccagtaatcgttaaccaagtagctataagcaactttatcagacaatacttggaaaccattggcaacaccgcgaggaacaaagataccttttgaggcatcaataacagtttgataaacatgaccgaaactgtcaccttcacgtaggtcaacccatgaccctagaactttaccttcgtcagccacagaaatgtatttatcccaaggttctgcatgaagtccacgcaaaacatttttatgcgagaagctgacgttattttgtaatttaccttctgcaaagaaagattctgggaaaccaagaggaaccattttttctttttggaagttttctttgaaccatccgcggttgtcaccgtgaactggaatatcaaattcaatcattccagggatagcttcaattttgcgcgctgctaattctttaccaaaaaactgttctgtcattagtcttctccaatcaaacgaagcaagtattttccgtattcatttttcttcaatggttgtgcaagattatgaacatcttcttttgtgatgtaacccatgcggtaagcaatttcttccaaatttgccacttgaagattttgcatacgttgtacagtttcaatgtattgagctgcttccaaaagactttcgtgcgttcctgtatcaagccatgcaaaaccacgttccataacttctacagaaaggtcgccacgttcaaggtaaactttgttgacatctgtaatttcaagttcaccacgcgcacttggtttaatgcttttagcaatttcaacaacatcattgtcatagaaataaagacctgttacagcatagtgagattttggatgttctggtttttcttcgattgaaatcgcgttgcgattgtcgtcaaattcaacaacaccaaaacgttctgggtctttgacttggtaaccaaagacagtagcccctttttctttgctagctgctttttgaagcattttgctaagtcctggtccatgataaatgttgtctcctaagataagagcaacgttatcatcgccgatgaattcttcaccgatgataaaagcttgtgccaatccgtctgggcttggttggacggcataagaaagtgaaattccaaattctgacccatcaccaagtaattcttcaaaacgatgaatgtcagtcggtgttgagatgattaaaatatctcgaattcctgccaacattagtgtagacaatggatagtaaatcattggtttatcatacactggcataagttgttttgaagccgcacgagtcaatgggtacaaacgtgtaccagatcctcctgctagaataatacctttcatagttaaggtctccctctttattaattatcagtcctattttaccattttttggaaatgctgtcactaagtttcctatttttgcaaggttttcaggaatttcctgcactaaaatagcacaaattctgcattaacatgacatttttaaacaaaaataggattgagacttcttctcaatcccacaacttattacaaatgataaaatggattagtttcggcttggctggctataaaatcaacattccattgattatcagctttccaagcattgaatttttcaaccaatttatcgataaaaagcacttcaatgtgatgcccagggtcaatcgcaagcataccgttggtaatcatttcttgggctgtgtgataataaatatctcctgtgatatacacttgtgcccctttttccattgcgtcatgataaaatccttgaccacttccgccacaaatcgcaacacggttaacaagagtttcttgatttccataagcaactaggcgtacactgtccaaatggaatttttcttttacttttaatgcaaaatcggaaaaagtctgcttctcaatctttccgatacgaccaatcccatagctatctgcagttggtgtcaaaatgtcagtgtccgtaatctccaagagctcacaaaaccaatcatttaaaccatctggcacaatatcaatgttagtatgactaacataaacggcaatatcgtgcttcaccaagtcaaggtaaatctgattttgtgccgttgcgaccaagtccttaagcggtttaaaaatcggagcgtgtttaacaataatcaaatcaacacctttttcaattgcttctgcaaccgtcgtctcacggacatcaagcgcaatcatcacacgattaacatccttgtcaagagtgccaatttgaagccctgaaatatctccttccatagataattcacgtgggcaatacgcctcataacgagcaataatctcacttgctttcattgatagcctccttaattgctgctattttttgtgaaatggctgcgcggtcatcgatacgatttttaggaacatgtggcaaagcaatctctaattttttcaattcacgtttccaacgtaatttgaagattgttgatttttcttggtttaaaaatggtccaaaacgcaattctgtatccgacaaagtcatttccccatgttctaccaccatgatttcgtagaatttatcattttcagtcatgattttttccgcaataattttgaaatgatttgccataagccaagcacgaagctcatcctcgcggttattaggttgtaaaatcagacgctcaacacttggtaatttatcaacgccagctgcgagaatatcagcaatcaaaccaccacccatgccacaaatggtgatagctgtcacattatcagattcgtcaaaagccgctaaaccgtctgctaaacgaacagcgattttatcagctaaaccagctcctgcaacattatgaagcgctgattcataaggtcctttaaccacttcacctgcaatagcaaatgaaattttttcctcttctgtcaaaacaattggtaagtaagcatggtcacttccaacatcaagtaaacgtgccccctgtggcacaaattccgccacggcagccaaacgttgtgataatactgtctgcataaattttccttctaaaatatcattcatttcaattatatcaaaaagcagttcaaaaagaaccgcttaattatttttcacattatctttgtaatacttgcagtaggattgaacggggcagatgtcacattttggctttttagccaagcaatgataacgtccaaagaaaatcaagcgatgatgtgttaaaatccaatctttctttggaattttcttcatcaagtcttgctcaatttcggtaacatcagcatctggtgctgagatattgagacgtttagcgatacgtgacacatgagtatccacagcgatggatgggataccatacacttctgccaaaacaacattagccgtcttacgtccaactccaggcaagctttcaagctccttatgcgtctttggaaccttgccatcaaaatctcgtaaaatagctcgcgctgtcttgatgatatttttggctttgtttttataaagaccaatcgttctcagacaatcttcaacatcttctaaatttgcattggctaaatcggcaatttcagggtattttttccaaaggtttggcgtgattttattaaccgccttatctgtcgtttgcgcagataaaatgaccgcgattagcaattgaaatggtgtctcccactccaactcaccacgtgcctctggatacatctcaccgataatagctaagattttctttaaacgttcgcgtcctactctcattagtcactccataaatccatagcagctagaaaatcatctgatacggatactttgcctgctttcgagtcctcgtgctctttacgacgttcctcaacttgacgcatggttgtaatcccctcacgacgccagttacgtaaaatcgcattgatataattccaatttgttttaccattaaaaacagcttcacgaagagctgcccgaaccaaatcagggtctgtcttgtcctcacgaattgttttttgcaaatcttccagttcaaatggactaagcatacgtcctaactcacgctcaaaatcttcaaccaattctttgataggatttgaagcttggttttcttgggtctctgcaggtttagctaacaagtcatccaaaagtgccaagactggacttgcatcaaaaataacctcaatttcactaccaagctcaatggttttcatatccaaaagaccttgcgctgtcaaatcagaaatcgaacgattcacttcggcaactgtcttgtctaaagcagtcgcaatttgactaggcgccaagtcatccattttggtcgtgttttgcaaataaataaactgccaaatcaaaaagtcatctgaacttttgaagatatctttataatgaaaaagaagagcactcggtaacaccaaattacccgatttaaaattttctaaaaaactcataataatattcctaaaagataatcgtatccatcaagtcatccgagatagagatttagcacgttttattgtcagaaaatcagccctgtctgattataggtaaccataaaatgaaaaatctttttccagttcttccaatgaatatggagtttcctgataaacagcataattaatccagttactaaagaatgttgttgctgccaaattccagtgcattggcacattttgggcggggtcgtcattcaaataatagtgttctggaatgttaggattttttccaaccttaacatcacgtttatattccctatcaagggtttctcgatcatattctaaatgtccaaagctataaacttcacgcaaatctttactagccacaatagacaagccaacagcttcactagccgcaataacttccaagtcatcaattttttcaacgtcttcacgacgcacctcggtataacgtgaatgtggcgccataaaactatcatcgaatccacgtacgataggattttcagggctaacaacgtcttgtgaaaaaatacctgataacttacggtctaacaaaacttttttgatgccgtatttatagtataaacccgcttgcgctccccaacaaagatgaagggttgaataaacgtgtgttttagaccaatcaaagatttgacaaagttcgctccagtaatcaacttcttcataatccaaagtttcaacaggagcacctgttatgattaatccatcataatacttatgtcgcacatcgtcaaatgttttgtaaaaagtttctaaatgttcagcagttgtatttttagactcatggctcgtcatataaagaaactcaacattaatctgcaaaggcgtattggctaacaggcgtaaaagctgtgtctctgtcacttcttttgttggcatcaagttgacaatgagaaaatccattggtctaatatcttgatgtttagcacgtttattatccataatgaagacattctcttcgcgtaaaatgtctaacgccggcaattctttatcaagttttattggcatgaaaatatctccattctataatattgtcttacgtaatattataaaatatggagatatagttttcaattatataatttctctaagtagttatagtttttagctataattaccctgggaaattcattaaaacttttgtatcgtaaccttcaagtgctttacgtccgttcaatccgtccaattcaacaaggaaagcacatccagctacaacaccgccaaggcgttctaccatttcgatagttgctttaacagtaccacctgttgccaaaaggtcgtcaacgataagaacacgttgtccaggtttaatagcgtcagcgtgcatacataatgtatcaatgccgtattctttttggtaatcggctgagattacttcacgtggcaatttaccaggtttacgaactggtgcgaagccaattccgagttcaaaggcaacagggcaaccgacgataaatccgcgtgcctctggaccgacaatcatgtcaatcttcttgtcagtagcgtactgtacaatttcgcgaacagcatagctataagcatttccatctgccatcaaaggagaaatatcacggaaagtgattccttctttaggatagttttcaattgtagcgatataattttttaaatccattttcttctttctatgggctttttgccaaaaaatgttttacatttcattatagcacacttttatgaaaaatgtaatacttacaaaaaaacttgtaataaaaggttcatctgacagtttctgaaaaagtctcatcatcattttgaaatgaaatattggctttctccaccttattctgacaagagttttaacgtttgctgctctaaaagagcgagatcgtattcttcatcttgactttctacatcaaaaataaccatttgcattatatagctaaaaaaaggtgaaatcgcaatacggatgacctctgtttttcgaagatgatttccttcacacagacgctcagcaattttatcaatagagggcgctaattgctccatctgtttcccaataaagtgcttcatttctgaattcgtcaatagttcttgcatgataatcttcaccaatgagtgattggctttgataaaagcgtaacgatcataaataaaataatgaacaatatcttctttcttgctaaacttcataatattttggataaaaggagcgctcaaaagttctgccattggctccaagacacctattaacaattcctcttttgtcttaaaatatttaaaaatagttgcttgactcactccagccacttctgctatttgtgcagttgatgttccatgaaatccttgcgctgcaaataacttcatagctgccaataaggtattgcgttttcccgaaggcattttaactttcgataaacgttcttcaaaagataaaacgatatttttttcagtcatgtaaaactaaactcctttttatcaccacttctttcattatatcacactttacgatagcgtttgagcccgataatattagcagtggttaaaccaacgagaaagattaataagattaaaatatcaaaggcaatgctattaaatccgtcaccatacatgataatcttagtcaaggcatctcctgagtatgagagaggaagaattttaccaatatactgtacccaatctgccatactatccagaggaatgattcctgagaaaaagagctgaggcatgattaccagcggtaaaaactgcatcatctgaaattctgattttgctagagtagataataaaattccaaaagctagggctaccaaagctaaaacaaaattcacaatgatgacattgataatattaccaactacctcaatatcaagcaaccagatagttgaaaggacaataacaacggtttgaataaccgctatgataccataggaaatcatatatccaaacacaatgtcgctacgtttaacgggtgtggctaacaaacgatcaagagtaccactcgtacgttctttgagtaacgccattcctgaaatcaaaaagacaaagaagaaaaccatgaagcccataaggattggaatcatcttggcaaagaatcccgtattttcgtcaccataatcataatgttcggttaagtcagtcgaactagcattgctggtagggagaagggaagcgagggtcggcgtttcagctacagcttccttaacttggctcataaactggttgatactagacaaactaagcaccgatttgatagcttgacgggttagagtggttttagatgagtctgtattggcataggttacgtcataagtatcatcatcaactgtaagaaccgcatcaacttcctgattatctaaatccttttgcgccgctttaacactagtatatttttcaacagaaacatgttccacatcatcaagattttcaatcaaactacttggcacctcaacagcagcaatagttactgaagttgtactattagccgaaaacatgatattcatcaaccacataataagaattggtgccaaaaacatcatagctagggtacgcttatcacgcagtaattcttttaatactttttttgcaatagctagaatacgcatcttaaaattcctctctatcttcagcagccaaaaatgcttcttccacagtattgacaccataacgctctttgagcccctgcggtgtatcaaaagcaatgacgtcaccatgtaagagcaaagcaaccttatctgtaagttctgcttcgtccataacgtgtgtcgtaatgaacacagaacgtccttcttggcgaatattatctaactctgcccatatttttcgacgaagagaagggtcaattcctaccgttggttcatccaaaatcagtaattcaggatttccaagtaaggcaatggcaagtgataaacgacgtttcattcctccagaatagcctgagacaaatttatcaagatgatcttgcaagtcaacaactcgtgctacatggtgaatttgcaaagttaagtctttcttggcaattcctttcatctgtccataaaattccaaattttcaagaccagtcaaggcatcataaagagcatccgattgagccatataaccaatttttcccaagatatgacgattaggcatttgagcattgagcaccaaagctgttccactatctgccttttccattcccagcatagtttttatcattgttgactttcctgcaccagatggaccaatcagtccgatgatttcacctttattaacttcaagggtcacaccattcaaaaccgtttgcgcagagaaagctttttttaaatctttcaaatcaatgactttctccattgataaaccttctttctatgtttgataaaagtgagtgattagttacttacaaaagacattatagtgagtattcactcacttgtcaagaaataagtctcttttttcttacattattaagcaaaaaacaagaagcctcaacatgagacttcttgttttttatagatagttttttagtccactaagccaagcaatcgtcggctgtaaaagacttgaccagaatgcatgctggcatcatcgataatggagaccagacgtacaccgcgtgtgactgctggcgtccaattgttatcaacgatatcatctaaactggattctgttagactttcaacataatttatcgctgctattgtagcagcctttaaatacccgaataaagcttccttattatcactttgaatcaagcgtgcttctgataaactatgcgcccaatcttgggcatcgtcagctatagtaaagggaaattctgctttccaattttgggtatgccagattggcttttcatctgccaaatcggcaatttgaaaatcgagctctcgtgcggtatgccaagctagccaagtcatggattttatctgcggcgcttgattggccacagggaagcgattagcttcctctatggtcacaccattaaaagcacgctcaaatcgctcataagcacgattaagattatctattaacaaatctttgtatgtcgtcatcttatcacctcgattgctatttattttgataaagtacattccattctttttgaagtgggtaacgaattaatcgactgctatcaagattttcttgatgcatatcaattgctgtgatttgtgaattttcataagtagtgtaataataaatccctttatcaacattcacacaagaactataaatagtatattcatatccattgctttcatcaacataacacaagcctttttgttgttcaacagatttcaaaatatggaagaattgattaacgctactagcttcagaactatcagctacagcatttaattttgtaaatgctaccttaacgaaacgcgacattgacgacaaatcacccggaagtcctattccacccataccacgactgtaaacatctaaatcgagaacttttgaaaataaattgtcagatacttttggcgataggtgacgataattattaagattaaataactgtttatcaaatgttggattattagttaaaacacctataggattatcatatatagccactttatcctttacaggttctacaacaatagattccttgctatctgaaatcatccaatgcaatggcgatacaggatagtctgaactaaaagcatcatcagttaaatttaaattttcacattgttgacgcacttctgacacactttcacactgcgacaagatccaaaggatgaattcaaaagaggcaacatttgttttgccatctttagcaggtttaaaatcagcattttctgggaaatttaatcctgccatacttaatcctttttcatttgtagcatcataaaacaatggatagtcatctacaactgttgccatgccaataattgctaaatgagtgtcttgttttgtctcgtacttgaatgaaagaggataatttctgggacaaatcgtaacttcttcatgataagaaaaatccaaatcaagatttcgaccaaaataattgtctttagtttgataagttatagctgtacacatacgctacctccactaacaagaactcctacaagaccaagccattacaacacgaacaaggtcttgatattcgatatttttacaccttcattatagtgctaatctgtactaaattcaattatttagtgattacaattgacgttatcatcatggattgcaacagtttattgaaaataaaattattatatcatgtcactagaatctgtatcaaaaaacaatcattttatcccagattcatattatttgactacctaaaaacaatatgttatagttattgtattaataatataatactaaaaatggaggattctaaatttgattatagattcaataaaaaaaagtaacggcttgttacaattagtaaccggaacagtcgtatttatggcgtttgtcataagctctaattttttaaaggatatgagtaaagaagctacagttgttggtgcttctctaagatttttgcttagcgttattttagctggtgtttgttattactttatcaaatctgaaaaattatttaacaagtctattaaactatcaagaatgtctaaaatttggctaacaatcttaattttactttttattgcctttttagtagtagctttaaatattggagataatattcaaggggtcttatcgggcgggtttggactctttctaccttctctgctggttgcattatcggcgggaatatttgaagaatttttagtgcgaggattatttttctccggcattttaaatcttttccaaaataatcgttttaaattaatattaacatcactaatctcctcagcaatatttgggctattgcatttggtcaatatcatacatagcccagtccaagctgttttacaacaagtgttctatgcaacggtgataggtttagtttttgctattatccgcataactgctaattcactttggctacccgtcctaatccacgctttaatcgattttcagccaacaattacatccggaacagttgatgtaaatccgtggttaacactcattattatttattcgccactagcactcttttctatcattacactgtttagtttagataaaaatcttaatcagcaagaaactaattgataaatttatactctcaaaaaccgacagttcagcaagaacttgtcgtttttttcattatcataatgttttataataatggcaaataggaggtgtcaatatgtttgaacaattaaaacaaactgccaatcaattaggacgtatgcgtaaagagcatcttatcaaccaatcaggctcaaccgctgatgatagcttggataaggtacgttcaggacaatcttatctttatatgagccaaggcatggatagcgaagtttttgaggttcgttttaaagaacgtgtctctggtagcgatttgaccgaagcgattcgttatgccttaatgcgttttccatacattaatacacgtttgattgagctagacggtgacttttacatcgtacaaaatcctgtcgccatggttgcgcatcccactaaaagcctcggaaaacttggcagcctgcgtactaatgaacatttggtagaagtcacttatcataaaaattctgcttattttgcttttcaccatgccctttgcgacggtcgcggtatcaagccgttcattgaaacagtcatttactactactgccaacgtttttatcattctaatgctcaagctgaaggcattcgtctcaaagatacaccacttttgccaaatgaaaccgctgatgctttctgggacttttacgattatgatgacagcaaagactttccaactttctctcgtgatgcctatgaaattcctgaaagcaagccaaatgatgacatcaacgactatcgttttgagattaccattccacaaagcgattacatggcagttgcaaaagctaacaacgcaacacctgtcattttactaagctatgcgatcagtcaaaccattgccaaacttttcccagattttgacaaaccaatcaatgctaacattgccaccgatatgcgtgcagcacttggctataaaaatacctttaaaaatactgtcaaatcaatgattctaccatatactaaagacgatacaagcaaaacgtttaaggaaattgctaccaactatcggacttatctcaatcaacaaaaagacattgatttctgtaaaaaagaggctaatggtatcatcggactttataataaactagatgaagcgtcgtcatttgaagagaaacaaaagctattagctttcatggaaaatattcacctcaacacttacaccattagctacattgggcaattcattctcaacgaaaacgagcaatatattgatagtattcacctttacagcgcaggaacaatcgggctttcaattaatatgatttgtgccagtggtaaattcaccattgatgtcaaacagaactttccagaagatacctatgtcaaaccattccttgaaaccttggcagaattgggtatcacaaacgcccaagtttctgacagtatcccatttaccacaccaaaagacggtttgagaaatcgaaactaaaaaattcacctagctcttttatgagtctaggtgaatctttttttgtatgatgacataattaacgatatgatattcttactttttagtcatttaccaaacaaaaccgtcatcatcattagtaacgtcttttgtctttctggtggtattttgcgtttgattttgtgaagctttaccaatcaaagcccctgctgcagccgctgccgcacctgctaacaaaatactcccaagaccaaatccgcctcttcgataaccgtaaggtgggcgatggggtggacgaggaccaccaaattctggaccacgaggtcccccaaaaccaccaggtccaccaggacctcgatcaaaatgattaggcatattactttaccaagagagcttcgctctttcctttcattgctttcaaagattatagcaagtagcatacggcgttttgcttaaacaaaactaaataaaacggctaacacattaaaaatcagccttgagacctagaaaaatgaaaaaacagccaccataagcttgcgcctatcgtaactgtttttaatgaatcactattttaatagaagaaatgtcctgacattgatttttgcaaaccagaataaccatagttagtaattttatcagatgaatccactgaccattttttatctttaagtgataacgaaatactgttttcgtctgtttctgtggctaattctgttgaatcaaaatgacttggaacactagcaaagacatatttttctgcatcctgcatcactgcttcatcagaagaaaaatctttaccagttgcttgttcaaggtaaccgtcaaccaaatcattcatatcaattttagcaatatcaattgatttagattcaacttttatttttgcagaagttggatacagctcttcaacagacacactaacttgtgcacgtttggcattggcttccatatattgattaacaaaagtttccatttcgctatcacttggtgtgaagtaatcaaattctgaacccaattcttctttgaaacgtttcacaaataattctttatctgcctcgatactatttccaagttggaaatcgttatcttttttcttatcggatttacttgccaagtttgttacttgagctgtatccgatgccttaactcctaccgaagttgattgcccaattgatgttgattgagaagccaaaaatacttggttaatataatcagacgctaattgttcaatttcatctcggttatcggtaactgtaacttttgcaagtgattgttctgcttcttttctatcgtaactatcgtctccagttactacacactctgcttcaattgaataatctttacttttctttggatcaactttataaacaagataaccagttcgtttcttccctttacctagacttgctccagcaagatccataaccttaaaatcgtttgttgatgcatagacatattcacttgatagtgtttcaccatcttcatctactagttgcacatccgatgagttaatctgaattttgtcgctacctttattttcaaaagtaacattataagcaacgtaggtagtgcccttttctgaatcttctggtatgatgacatcggctgaattaaccgtaatttttagtggacttccagatatcgcactagcaacagaagtccctgttgaagcttgataaatagcaaatcctacaccaccaattacaataacaccagcaactccagcgatgattttcttcgttttgcttaaaccactccattgtgattttgctttcccaacaacctcagaaaacttatttgttcccttttcattttgattcgtattctttgaatccattttttatctccttttcccaaatagttacgctttctattataccttaaacaaagcttaaaataaataccaaactaacatttttattaaaaaaacttaatattcaatttagtttgaaacaacaaattaaaaatctccttggaactataatattccaaggaggttatttttagtcatcttcatcagttagccaatcgtaaatttcttgtggggttccgagcgccattagctcttggaatttaacttgttgtttgaggtcttggtagatttggctttctgaaatactgcgtttctgggcatctttgttgacgaccataacaccatctgtgatggttacaaaatctaattcatcaaaaatctgaatcattttaacgagtaaaatatcagggatattaaggtattgactcaaatctttcaacttgtagcggacatcaaattctgggaattgatagatagttttataaagcttagcaaattggtcacgtgtgccatagcctgtcagataataagcacgtttaatatgatttttaaaataaacggcttcaaaatgacgaccgacaaagagtgatttcaattcttcagccttatcaggaatgtctaacaccacaacttcatttgccgtgctatcttcagccaatactggaacacgttctggaaggctagctgttttggagcgaatatcaatcaactgaacaccctcaacacgcgcatcttccaacattaattgaacagtcgtttgcccattccacttattaatcgataaggtcgttgcaaggcaaagattttgcgcttgttgaaattcctgcgccagatgtccttgattaaaggcaacaaggtcaattgccgttgtgccttgggcaatttttaattttaaatgcgcgccattttgtcccatggtgcgtgcttgtttcaccacaaaatctttaatttcaaagactggttttggattgtccatgccaaatggtgccaatttttcaagactgtgcacggtatcaaggtcaatctctgatagctccagaacctcatcaataacaagctcttttttctgtgataagtcaatatcattttcagcaatataatcacacaaaacttgtgataatttatcaagattttcagtcaccaaggtcattccagcagcgccagcgtgtccaccaaaggcttcaaataagccacggtgctcatcaagggcatggaaaatattaatggcctcaatacttctggctgaacctttagcaagcccatcttcgatatttaaaacaatcactggctgcgcgatttgttctaaaatacgccctgcgacaattcctaaaacgcctgggtgccaaccttctttagccaatacttgcactggcttttccaaatcaaccatgctcatggcttcatcgaagatttcctgaacaatttccttgcgttcttcgtttttagcattaatcatcttggcaatgttatgcgcttcttcgtcatcaaagccagtcaataattcgacagcaggatttgggtcatctaggcgaccaagtgcatttagctgcggagcaattttgaaaccaaccgtttcttcattgacatctgccatatccacgtctgagactttcatcaattcaatcagaccaatgcgttcggtttgtttcagaatttcaagtccgactttaaccataatacggttttcatcagtcaaactcaccatatcagcaattgttccaattgccaccagatcaagcatttctgtcggaatagattctagcaaagcacaagcaactttgaaagcaacgccacagccagccagatatttgaacggataatcagcttctgggtgttctgggtgcacaatcgcaaatgcttctggtagctctgctggcaaaccgtggtggtctgtcacaatgacatctaccccctgactttgtgcgtaggcaatcgcttcatgccctgctacgccattgtccaccgtgataatcaaagaaacgttttgctgctcaatgaaatatttatagaccgactcattgggaccataaccatctgtgaaacgatttggcagataaacttgagcttcagcgcctaacatttcaagggcttctttcataatactggcactagtcattccgtcagcatcatagtcaccataaaccaaaatttgctcgtagttctcaatggcttggcgaatacgctcaaccgctttatccatgtcatgtaaaaggtaaggggcatgcaattgtgacaaatccgttgataaaaattgagtcaatttttctgccgtatcaacacctcggctataaagaatctgactagctaattctgttagtttttctttttttgtcagctcaaaaaagccattatctggctctttttcaatatttttccaattgtatttacttgttatcattcacttctcacttcttatgtagagttgaaacgacgcttgttttatttgtaattaaatacttttctagctagaaaatctgcgattcttgggaaaagtgtgtaagctttgtgagctgccgcaagcgaccaaggcatatttagctcacgcttattcttgccaaaaatggcaacggtgcgtttcgcaacgtattctggctgtaaaacaaaccgcccaacacttttaagatagtctcctgatgggtctgctttatcaaaaaatttcgttgcaatcggtccagggttgacagtcgtcacgtaaacattgctatcagctaattctagtcgcaaagcatttgaaaaaccaatcacagcaaattttgttgcagaataaacagaagatttggcagaagcaatcaagcctgcaatgctagcaatattgataatatgacctttccctgcctctttcatcttttgccctactaaacgtgaaaacgtcattgttgcaaaggtattaacatcaaacatgtcacgaatttgcgccgtagtataagtgtcgaaatcactaaaacctccgtacccagcattattgataaaaatatcaacacgtccatggatagcatagattttttcaaccgtttcagcaatcgctacatcgcttgacatatcaagggcaaagcaagctgtgtttggacgattgccataatgtgtttttaatttctttaaatcacgtcccaaggcaatcacataatcgtctttggggatacgtttgatgatttcttgagcaataccacctgttgctcctgtaatggctataattctcataagctaatttcttccaaatctttaacaaggtgcgtgttttcaaagactgttttggcgtcaatttcgacttgtttgcactcacgccctagaaaacgagcactaatgtggttaagcaaaagcattttagctgacgcctctttggcaatttgcgcagcttgcatgttcgttgaatgaccatgtttacgcgcaattttttcatcacctttgccgtaagttgattcgtgaactaaaatatcagctcccaaaccaagacgaacactagcatctgtcttacgtgtgtcacctaaaatagtaataatttttccttttttcggtgctgaaatgtaatctttagcaatgatttttgttccgtcttctaagataacatcttgcccactcttgattttgccaaaaagtggtccgaaagggacaccagcagccttcagagcctcagcatcaagcgttccttctaaatctttttgcatcacacgataaccaatacagaaaatcgtatgatcaagtttttccgcgtaaaccacaaatttatcagtttccataaccttaccaaggctattctcgtcaaattcatggaaatgaatgcgatatggcaagcgtgctcctgacaagcgcaagctatttaaaatatacgaacgaataccaataggaccgtaaacatcaaggtctgtttgttcctcgttagcttgaaaagctcggctagccaaaaatccaggcaaaccaaaaatatggtctccatgcaaatgcgtgataaaaatgcgcttaactttacgcggtttgattgttgtttctaaaatctgacgctgtgtaccttcgccacagtcaaacatccagacctcattgatttcatcaagtagcttcaaaaccaaacttgacacattacgtgactttgatggctgacccgctcctgttcccaaaaattgtaattccattctataatgataaaaaccgaagtttttatctcctttcctctactgtacttttacataagtggtgaattcacgttggtcaaaggtataataaacttgtcctttgtagtgagctagtaattctactaattcatcacgattaaaactttgtagcttaaccacatttccttttaattttgaaacatggctgagcaaactttcttgtggcgttaggtcctcaaggacttcttcatcaaaatccatttttgacatttttatgtgtccttcttccacgtaaatcttatattgtgggaaaacctgcgccaattcaaacaaaacatctgcagctagcgcctcattcttttcagaaaaaacacgcgctacttctttgtcattttcataggtaaaaccatatgattttcctgataaattcaagcgaataaagggcttgtattcatcaaaagatgggttagcatttaacaaatgcaattctttagataattcaaaataataatctgttgcggcttctggagattgtttttgatacatttccgcaaaataagcattgataacacttggtggcggtgtgataaaactgagtttttgctcatccgtcaactgctccaaggtattttgtaaataaactttatcgagtgatgtaaaaccaccgtattttaaagccaagcttatataatcagtcataaaattcttctagtctccatttatttttaggattgatgtagccagtaatggtttcgtattcttgggcaaagtcataatggtctagcaaagcaattttatttaactcatacaatttgtaagcctgactttggtgaacacgaatgctaaatggctcaaaaatctcacgaatttcattgataatcaaacggcgtaagagtgtgcgagcgtccttatcacgcgcagaaatacgcacatttggaaaagctgttgccaccaaatgctccgcaacgtccattttgttataaacagctaagcgcggaatatctagcatgtccagctcttttaacaaattcaaaaccactttttcatgctccgcatgatttgggtcgctggcatcaataacgtgcaacaaaaggtcaacgttacgactttcttccaaagttgacttaaacgcagcaaccagctctgtcggtaaattttggataaatccaacggtatctgtcagcgtcacctgaaattgattttgtaaataaatttgtttggttgttgcatccaaggttgcaaacaattcatcggcttcatactgtttatcattggttaaaacgttcataatcgttgatttaccagcattggtgtaaccaattaaaccgattttaaacacttgtgattcggtgcgtttttcacgacctgtttcacgatttttttcgacaacctttagttgacgttcaatatctgaaatttgatgacgaattgagcggcgattaagttccaattgactttcaccaggaccacggctaccgataccaccagcttgtcggctcaacataaccccttgtccaacaagacgtggcaacatgtatttgagctgagcgagatgaacttgcaatttcccctcatgactacgtgcccgcatggcaaaaatatccagaattaactgcatacggtcaatcactttgacaccaagttcaacttccaagttgacattttgccgaggagtcaggcggtcattgacaataacggtgtcaatctcatcagcttccacaatcgctttaatctcggctaatttgcccgaaccaatcaaagacttactgtcgtatttttcacgcttttgacgataagaagagacaacttctgcccctgccgtcttagctagagaagctaattcttccattgacatctcaaaattttccgtctctggcaactcaacacctagtaaaataacacgctcctgacgcttgcttgtttcaatcatctgctcacccctttctctttaatccgtaactatcattataacataaaaagttccaaaaagtggcagaaaccctgttactctcttctgacatttcattataatttctatgacaaatgaaactctttacatagagttacactactttaaaaattcgttaacgtcttgaataacagtttctttaaaatcaacttctgaaacattgtaaaaattgacagccatgcgatttctgaaccacgtcaattggcgcttggcgaaacggcgcgtgttctgcttgagtttttcgacacagtcttccaaagaagcgtcgcctgtaaaatatggaaaaagctctttataaccaatcgctcgcgctgcttgagcattacggtgattatcataaagccatttagcttcatccaaaatgcccttttcaagcatcaggtcaacacggtgattgatacggtcataaagcacctgacggtcatcatttaacccaatgagaagcgcctcgtaattcgtttctttgttttcaagattttgcccaaatttggctagttccaaggcacgaatggcacggcgacggtttatctctggaatctcttttcccagctctgctatttttccaaataaaacctcatctgacaattgttccaaggttttgcgataagccaagacttttttttggtcaacctcgccgcctaggtgatacccttcaagcaagctctgcaaatacaagcctgtgccaccaacgataatgggcactttgccacgactggcaatctccgtaatcgcttgactggcttccaccacaaaatcgtaaacagaataattggcatcaacatcacgcacatcgattaaatgatgcggagctgccgcctgttcttcaggagttgccttagccgttccaatgtccaaatggcggtaaacttgttggctatcgccgctgatgatttcaccgttaaattgttgtgccaactcaattcccaaagctgtttttccaaccgccgtcggaccaactactgcaattaattttattttttctgacatctcgtctttatatccgtcctaagccctattttttaataaaaataacgttttcacttgaattttaagtcatttttcgttaccattattataacataaaggcgactggacaagaagcttgcgttccgttgctaataatgggtattattgattttgcacgctgttcttatcagtaaggaggagaattattatggctaaaaaatttgcatttgctaaaggacttgctactggagttgtagctactgccgctactgttgctggcgctgtttttgcgattaagaaaaatattattgatcctgaagaagaaaaagctgctttcattcaagaaaaccgtaaaaaagcagcccgtaaacgtgtttctcactaattgctgaaaaaagtataaaaaaagctatgagttagattgctcatagcgtttttttgtattctttacaaaatctcccattctttgatatcacattcgtctagcaatgcttggattttgtcaaaagctaagcggaaatgctccaacttgtgcccgtctgaaccaatggaatacttatgtccgcctaattctcttaccaagcctaaggcatagcgataaaggtcctcgtgatgatagaggtacattgatttactatttaactcaaatgccaaatcaaaatcaatcattttttggaaaatgcggcggagctgttcttcatagacttgtaattctgccacagaaacctcaaaaagtcgaaaaccataatcaaaatgagctaaaacgtctgcctctacacgaccaatagcatgttccaatttgtcgagatattcttgaataatggcatttttatccatgtcagccacttcatcatctagataatcattaataccattgtggtgaactgacaatagtttcaaatcataatctttatttgccaagaaagctgtaatatctgcctcgcgtggctcataataaccaatttcaatgccacgcttgatgcgattaccatatttggcattcagctcagctatttccttagaataagcgtcataatcaggaatgtcatcctgtttcgtataaggatttgataaatcgtagtgctctgttgtcacaatatcgccgtcataatgctctaagtaatcctcgaatcgagcatccgaatcataagaaaaatgtgtgtgtaagtgattgtcacgcattggttttacctcgctgtatttatgttagatgttctttaatccccaccaaaaatttttgtcagtttttcctattttaccaaattttcagacaaatacatacttttttcgttatagtttgtaactatatataaccccataaaaataactatttttcaaaatggcaaagcttttatacaatgaacacagaaagataaagaggtatttgaaatggttaattcaaaatttcaactcgttggttcgcttttgcgaccagcagacttacgtgaatataaaacagcgattgaacatcgtgatgatattgtttaccctttctatgatgcttttgacggctatcaagaaaccgaaacagctgacattaaaaaaataattgctgaagaaaaggcaaacggtattgatattgtcactgacggtgaatattcaaaatcaatgtggcaccttgattttgtctggggactaaaaggtatcgaacgctatattgctgaccatggttacactttccaagaccatgacggtggtcaatttgaaacacgcaaagacattggcattcgtatcactgaaccactttctggtaaaaatcatcattttcttgatatttttaaactcgttaaacaagaagctggcgatacagctaccaaattaaccatttggggacctgcgcatgcttacactgaattggcgatttttgacggattggctggggaaaatcaagtttacaagacaaatgaagaactaaaagctggtcttatcaacgcttacaaggaatttttaacagaatacaaagaagctggtggagaaatcatccaatttgacgattgtctctgggaactttttgacgaatctaatcctgctagtttttttgcggaaggaaatggtggtttagcagacttggcagatgaattcatcgctattaacaacgaagttgctgactatggacatgaacttgggctaaaagtttggacacataactgccgtggaaattacgaaagtcgttctgctgctggtggcacttatgaagctatcgccacaaaattcttgaaagatcaacactacgaccgcttcttccttgaatgggacagcgaagtctctggtgaccttaaagctcttgaaagtttgaaagatagagatgctgaagtagttcttgggctactttcaagtaaaacaactgaccttgatgatgaagaacgcgctctaaaacttttagaagaagcaagcaacatcatccctaaagaacgtcttttcctttctcaccaatgtggttttgcctcatgtgactctggaaatgaactcgctattccacaacaatgggctaaaatcaaacaagggcaagaaattgctgctaaattctggaaataatattctctgaattcaaaaataattttgtttacaactaataaccctctgagacaaggacatctcagagggttatttttattcaagtgataaaacaatatgatgttttatagtttaacaacttctagctgttcgccaccaagcaagacgaggtatttatcaacgccttttctatcataagacttgctgagagcttctgcatataaagccatttgtccttgatagcgttccttgatttccacgctatttttgtatttatcagtcttgtaatcaaagagtacgatgcggtcatctaagacaaggtaaccatcgacaatcccacggacaacgaatttttccttactgtcagggtcctcttttaacatggcaaaaggtgcttcgcgataaaccttgtccgtatgttgctgaatcaactgaccgagctctgaattttcaaaaaaggctaggacattttccaaacgaatacgtgctttcacctcatcttctgccgaaacttgggctaaagccgcggtaatatcggctatcgtcacctgttttgatagaggaatacgttgcatgagttcatgcattgccgaaccaatggctgtcgcttcgattttggctttcttcgaaaaatctggcaattcaaatgttggttgtgcttgataggcttttgtcatcacgtcaacaccatcagtatccatgactggctcatagagttttttgacctgacttggcgttctcagacttggcaaattgatggctgcatggtacttcgcatttaacttttcgacagcttccaatctatccaaggcttccgtgatattttcagactggcggttatctgtcaaatcatctggcgttatcacagaagtggcttcaattttaccaatcttatcatctgtcaaatcttcatccgtgacaaaatcaacggcaaaaggcatgttctccttgctataagcctcataaatggctaacacccaatcttgaaaggtcatgaaattctcacgttctgccactggcaaatgattgttttctgatttaccgctatatttatccactaacttttcggagcttgcttttccgaccaaatacaatttcttttctgcgcgggtcatggcaacgtaaaacaatcgcatttgttctgaaagcgtagctaagcgcaattcacgcttattgagctggtaaggcaaggtatccatgctaaccttgactgttgggaaaacgtccgtttccaactcttctttcatatcagctaggtacttgatacctgcaccattttgacgtgataaaatcaagggtgacatcaaatcctgaatactaaatttcttgtcaatattcaaaatgaaaacatactcgaactcgagacctttacttttatgaatagtcatcaagttcaccgcatttttaggcagagccacctcaacgtccgcaaggtcattctcactttctaacaccttatcaatcatgcgaataaatcgtgagagtcctttaaaaccagttcgttcaaaattattggcacgaagagctaaagcatataaattcgcttgacgttgctcagcacgtggtaaattgcccacgtaatcatagtaaaatctgtcgttgtaaattttccaaatcaagtcataaagcgcatgccatttggcaaattcacgccaagcagcaaaacaagccataaaatcagccaatttatcatgtaaagcaattgttatcaattcattatgacttcctttgccagctaaagtatgctctaatttttgatacaaattagctctatggtcatcttctgttgtttgtagcgcaaggcgtgccagctcatcttcattgaatgaaaacatcggtgaacgcatgagtgccactaaggcatagtcattgagcggattatcaagggcgcgaagcgtgtcaagcataaccatgacttcgactgatttaaggtaattttgctcaccaccgtcagtcaccaaaggaataccatagtgttcaaaggtttgtaaaataccgtcattacgcgtgcgtgatgagaccaacaaggtaatatcctcgaaagcaacgtgttcctcattgtgcaaatgaatgatttctttagccactaacttgacttcgttagggttgatttgtccttcttcggcatcacttggcaagtcactattgttatcaatgtcgtagataagcacttgcgttttattttctgggtgactttccttttgagcagggcttccagcgaccaattgatgtgtgtcatcgtacaaaatctcaccaacagcctcgtccattaaatgcgtaaaaatactgtttgtcgcatctaaaacttctgactgactacggaaattctcttttaacaaaattaatttcccacggtcaggatgttcttgaaaatctttaaatttttggttaaaaatctgtgggtcggcttgacggaagcggtaaatggattgcttgatatcccctaccataaaccgattatgaccattcgacaacaactccaacatgcgttcttgcgtgtggttattatcttggtactcatcgaccatgacttcgtgatacttattctgataaagctcacgaatatcagcgttttcttctaaaatctgaatggcaaaatgggcaatatccgaaaattcaaaagcattttcttggattttcgcttgcaaatattgctctgaaaaatcttgcataaatgtctgcaataactctagcaacggaaggctttctggctggtatttaaaaatggtttccaaatgtttcaaaccagtcaaacgcccctgtaagggtttaaagacgggatatttcgttcctgcaactgtcacagcaggaccagctggaagcaatttcgccacatctgtcgccaaacgtccaagaccgtcacgaccataaagagtttcaaaatgctgtgcccattcacgcaaatgctcaatgatattcaaatgctttttataattggctgtgggtgttcctttggctgttttttgcttgtagtcttccaaatcagtcacatcttgcaactggtcagccgtatcatgcaagcaagtcagaaaatccgtgacttcttggtcaggaattgctgaaaaatcggtataagttttagcaccttttaaaaatacttctgccaaccacttctgtggattatcagttgcttgactaaagtcataaattttatagacaatgcccctaaaagcggtgctatccttacgattgccagaaaaattccgcactaattgacgaaaaagctcagcatcatttcctgtcatgtaatcagaaaaaaggtcaaaaaagacttcatttttcaaaatatcttgctcactcttatccgtcataatacgaaaagttggtgaaattcccagcgtgtagccgtattgattgaccaatttctgcgtaaaagcatccatggttccaatatcagctgtctgtaagcccagcaactgctcattgagataatttttcaaatcattgtcagtcgtttcttgcagagcttggctaattttcttctcaatacgctcttttaattccccagcagccttgaccgtgaaggttgaaatgaatagctggtcaatcgtcacaccacgcaaaattttatcaataatgcgttcaaccatgacaaaggtttttccagaaccagccgatgcagacaccaaaatattattgccataactataaatagcttcgatttgttctggcgtacgtttttgttttttggatgactgcgcttcttggatttgtagagaagaaatgtcttctgacgttagaaatggtttaaagatcatctgtttcctcctcttcttgcattaggctcaaaaagccttgacgtctatcttttcttggtaatttataccatttgcgagcataaggcatatggcggtcagcctcaaatcgtgtgattgccttcaattggtctccttgaactgacttaccgtcctcactataaggattaatcaagaaatgccccttcttaatctgctctgctgctttcagatataagttttgattataagctagcaaaatctcaagttcttcttgactgtaaagcgaatcattcagatgatagcgaccattggctaaatacgctttttcatcttccaagaatagaccacgataagtcaactctttagccaaattttctaaaattttctctgttgtagccaccgatgacaaatcaacttttggctcttgcatatgcaaatacatagcaccaaaaatatgctccgactcgctcaagccttttttatcacgcaaagcttgcacataagtcaccaattgcggacttaaaccattgtagaatttctgaatatcaaaagtattgcgacttgatttgtaatccacaatgccaagactgccgtctgataagcggtcaacacggtcaataattcctctgatacgaacgctatttgcaatcattaattcaaacgtttcttcttcactttcaacttgaatctgagcatcatcacgtaaaatcgttgccgtacttctagcaatatcttccaagacagtcaaagaataacgactttcttcatcttcttcgtaaacaaatttgaaatcgtcttccaaattcgttgtttgaatagctttatcaagtttgctatcaaaagaatggtttgaatcatctttcatgaccaattcaaaaacacggtgcaggtaagtaccatgatttctagcatctgggtgaatcgtctcaacctcttgcaagccaagaacatattgcaagaaatatttatactgattattgtagaaggtagtgactgcagatgatgataacgaaatcggctcatcacttggaaaacgtgcctcaatcacgtcggcagagaccgtcttagtttgcatattatccttaatcagtggcaattcaataccttctgctgccaatttttttcgaagataacgaacagcaactgaccagaaagtttgctcttccttgctaagttcacgctcttcttcaatcgccaaacgattgacttcaatcacgcgcgacaataaggccttataattgccaatgtcctcagcacccgttgacaaacgattacgacctttagcaagaactggcacaccaaagctagctaattcggttaagtaagaagattccgtatcttcggcttcgttggcaatttgtggcagactaagcaccaattcttctgtcgccgagttaaacaacgatagggcagctaaatgatttttcttgatattttcgcgactaacaatatcaaaacgttgattatcatcagttgatccgttgatttgggcacgttcttcatctgaaatcagactactattttgcgcaatttttggaaaatgtgcctgcgtcatgcccaaagcaaagacaaatttattggtgtgcggttccaccaaatcataagatttgaccgaaacaacatcaaccgttgcaggcaccacacggtactgcgcagctaacattccgctgcgaatcaaggacaaacagtcatccaacgataacttttcttgcccaaaaatcgtttgaaattgcgttaaaatacctgtaaatgtccgccaaacttgctcatgcttttcttgttcattttctgaaaaagtcgctaccatgccttctagattatcagataaatgaatggcgtgtaaaaatgtcattaatttctcaagcaaactagagccacgttgcttttgcgccttaaataaagcaagtaaaggcgtcatgatttgctcgcgcatgcgattaacaaaggctaaatgtttttttcccttataaacaatcgtgaattccttagcaaatttgctttgtcccttaatatcagcataaatcaaatattgctcaaaaaggtctaaatcttcttgcttgaaatttccataaagccctgtttttaacagattaacgacatcttcggtacgaaaacgataacgcttcacacgctccaacgaatcaataaaatgcaccaaagggtggtcactcattgactccgcttttccgaaataataaggaatgtcatatttgtcaaaaatcttgccaatttgcaaacgatagctgtccacatcacctaagagcactaaaatatccttgtaacgatacccttgataaagcttatgacgaatagctttcgccacatgctcgacctcttctttctgattaatgacatcccaaatagcgtaatgttttttatcatcagccgtcagcgtcacatctgaactcgtaaagtcgtgctttgcttcgaataattttgataattttgaaaaagcctcgtgagatttctgagaactttcaacatactgcggttgcgcatggaatttagccgctaaaccacgcaagaaatctaaacttgcttggtaaacatttcccgtcgaaaatgccgctctatacgccttttgactactgtaagttccgataatcacttgcgcacatttttcttcaagcaagcttactagatactcttcttctgctgaaaagcgtgtaaaaccgtcaataacaaggctcacattttcaagcgtagcatccaaatttcctgcctcaacctgctttgcaaaataagcaatcttgctctgattatcatactgattggcaagcaaaatatcattaaccgctaaaaagattttcaccaaatcttcctgcttctccgctgaatgcaattctgtcaaatcaagcacagtcatgttagccgtttttaattctttgtacaaatcaaccaactgcttgataaaattcgtatcctgcttcaaacgcccaaaaactttcaaatctgtatctgaaaaatgtgacaaagcacggtaaaaaatcatagccaagccattgtcatcaatgctttccttgacctgcgcttcatttaacacaaaataacgagccatttgagcaaaacgtgttaccgtaatcgcaaaagaagcttcttctggtaacaactccaaaactgctctttctttttcaaaagataaagagttgggagcaatgtaaaaaacacgcttaccagcatctgcctgcgctactgcctctccaactaaaatctcagtcatatcatactgaatatctgtgtatagtaatttcataacataccttcattaagcaaatcgttactcctattataccagatttcaaagtgtttataagctctcaacaatcatcaaaaatcccaccactactttcgtaatggtgggagtcatctatattacccaaaatagcctaatgagtttggaaattaacgaacttctgcgccgagttggtcaataaggactttagtgattttatccatgtatttagcaacttcttcgtcagttaagttgtcatttggattttggaatgtgaggctgtaagccattgatttcatgccttcagcgatattggctccagcataaacgtcaaagagtttgatgtcagtcaaacgtttcactttagctgattcaatcgctgctaggatttctttatgggttgttgctgctggtaatagcaaagcaatgtcacgagaaacagcagggaattttgtgatttcaacaaacgctttatcagcgtgaagcgctgcttcaatgatatccaaattcaattcagccacgtaagtttctggaacgttatagtttttagcagtttgtgggtgaacttgtccaacaaaaccaactaattgaccgtccaagtaaatgcttgctgtacgacctgggtgcatgctagcaagacctttttcagctacataatcaactgtcaaatcaagtttggcaaagatagcttcaacgatacctttcgcacagaagaaatcaactggcgttgcttttgtttggaaatctttttcagcaaccaatccagaaatcgcaaaggcaaatgtgctgacttcgtttggcaattcttcttttggattacctttttgttcaaagactttaccgatttcgtagattgccaagttgctatttttacgagcaacgttgtaagccacagtatcaagcataccagaaacaacattttggcgaagaactgagcgttctactgacattggccacatcaattctgtcaagttgcttggttgcaatgtaaattcagttgctttttcaggtgttgtcaaagcgtatgacacaatttcagtcaaaccaacaccctcagcgattgaacgcattttacgacgtaatttttgtgttgctgtcaattcacctgctgtacctgcagcttctggaagtgtagttgggaggttatcataaccataaatacgtgcgatttcttcaaccaaatcagcttggatagcaatatcccaacgacgacgtggcacagaaactgtaaatttatctgcatttcctgacaaaccaaagccaagtttggcaaagacatcttcaatgtcagcgtaagtcaattctgttcccaaacgaacgttaacataatcaagtgttgttgatacttcaacatcttcagttggaactgaaccagcttcaacacgaccagcaagaacatcaccgtcagctaattctgtaagcattgccgctgcaaaatcaagagcttcagcaacagttgcatagttgatacctttttcaaaacgtgatgaactttcagaacggaggttcaaacgaccgcttgttttacgaattgatgttccgtcaaagactgctgcttcaagcacaacgtttttagaattgtcatcaatttcagtagcttgaccacccataacacctgcaagtgcaactggtttgtcagcaactgtgataacaaggtcttcagcaatcaattcacgttcttcgccgtcaagagtaaccaatttctcaccagcacgcgcattgcgggcaacgattttgttatcttcaaatttgttcaaatcaaaggcatgcattggttgaccaaagtacaacaagacatagtttgtcacatcaacaacgttattgattggacggataccagcgttcatcaaaaggttttgcaaccattgtggacttggtttaacagtcacattttcaaccacacgcgctttgtaagtcaagactttatcagattcaatagcaacgttgataacatcttttgctgctttagaaacttctttaagttctttttctgggaaatgaacttctttaccataaatggcagccacttcgtgagcaacaccgcgcatagaaagagcatctgcacggtttggcgtgattgacaattcaacgatttcatcgtctaaatcaagatatgggaaaatgctatcacctggtttagcatcttctggcaaaatttggataccgtctgagaattcttttggaatgatagaatctggcaaaccaagttcttggagtgagcaaatcatcccaagtgattccatgccacggattttaccttttttgattttgtagttatcagcaatacgtgcacctggaacagccacgatgacgttgataccagcagtcacatttggagcaccgcagacaatttgacgcaactcttcatcacctgtatccacttggcaaagatgcaaatgtgtttctggaacatcttcacaagatacaacgtgaccaacaactagttttgtcaagccttcagacggtgttgaaacaccttcgacttcaatccctgttgttgacattttttcagaaagctcatgtgttgttacatcaacatcaacaagctcttttaaccatttataacttactaacataataatgtgttaaaagcttttcgcagtcaaaatacgtttgacaggcaagcttctttatccctttctactgttattctttcaaggcttttctcaaaagccaatctgtatctactttatcgccaactttaaaagagtgttctgaaaatttttcaaaaccatattttcgatagaacccttgtgccttaacattatgttcccagacacctaaccaagcccaatcaaagccaccttcttttgccatatcaagcgctagctcaaataatttcttacctaagcctaatccttgacactcgttaagaatgtaaatgcgttgaatttcaaaggcattttctagttcgtgttcggtctgtgcggcgccccaattaactttcataaagccaacctcacgcccatcaaccaagacaaaacgaacatcagattctgggtcagtcacctctttttcgagttgttctaaagtgtaactatcatcgaaaaactgttgaagttcttcttcggtattatcaaaagcaaaggtttcacgaaaagtctgaatactaagttcttgcaagatacttaatttatccaatgtcactttctcaacttttatttctgacatatcttttcctccaatcgtttttctgttatctcgttttatttaaattgttctgagaaacggacatcgccttggtagaaaccacggatatcattgataccatagcgaagcattgcgatacgttcttgaccaagaccaaaagcaaagccagaatatttttcagaatcaacaccagacatttccaaaacgcgagggtgtaccataccagcaccaaggatttcaatccaaccagttttcttacatacgttacatcctttaccaccacatttgaagcatgagacgtcaacttctactgatggttcagtaaatgggaagtatgatggacgaagacgaattttacggtcttcaccaaacattttcttgataatcatttcaagcgttccttttaagtcacccatagaaatgttttccccaacaacaagaccttcgatttggtggaattggtggctgtgagtcgcatcatctgtatcacgacggaaaacacgccctggtgaaatcattttcaaaggacctttagaaaagtcgtgcttatcaagtgtacgtgcttgcacaggacttgtgtgcgtacgaagcaagatttcttcagtaatgtagaacgtatcttgcatatcacgcgctgggtggtcttttggcaaattcatacgttcaaagttataatagtcagattccacttcataaccatcaacaacttggaatcccataccaaggaaaatatcttcgatttcttcacttgtttgtgtcaagacatgacggttaccaaggttaacttgacgtcctggaagtgtcacatccaaactttctgattctagttgtgcttggattttagcagcttcaacaattttagcttgttcttcgaaagcttttgtcaaaacatcacggacttcattgacttgttttccgacaactggacgcatttctttagaaagatctttcaaacctttcaatagttctgtcaatgatccttttttaccaagaacttgcacacgtaattcttgaagttcttttgcattgtttccacgcatttcagccaatttagcttgcgtagatgattttaattcctctaactgcgcttgtaaatccattaaaattccttccttgggtaagaccctaatgtttttaaacgaaaaaagcgtgccacactccaatagcggagcgttgacacgcggtaccatccgttttttatctgactagcagaccttaatttatcgtctttaacatgagtgaattcgccaaactttcatctaggaagcttccagtcacggcttccattccctgttaaactgccataaggttactagtctcataagacactattcaatttataacccattctagcaaatttttagccatttgacaagacaatcacttgatttatgctgagcttggcattaatcacaattaccgataacagtcttggttattgttgacctcggcgcatcttgtaataagcttccagtctttcttgttcattataaccttgcttttgcaattcagctaattttccatgaatttcaattttttcattcaaatagtgctgtgtttcttgaagctctaaaatttgtaaatctaattctttcttcgttttttctaatagcttcgttgataacacatggtcattaaaactagccataaccgtacgaatatcatcaagagacattccaactctacgataatgattaattgcccttagggtatcaatactagcctcatcaaaatcacgaataccatttttattacgtggaatactaaccaagccttccttttcataaaaacgaatggtataggctgacatgccaagttcttctgaaatctcttttatgcttttcatgtatcacctcacctaaaactttttaccaagaataacaatcagatcctacaccaactgtgggaaaataccatctttgtttgtccgtgttccaaaattcattgttcctaaacacaatcggctgacgcgtaagccagtatttcctaagttagtatattccatgacaatctccttttctatgcgagattagttactaaatctagacgacaacttacaaaacttgtgcggttggtctgatgacaatttcattaattgatgtattagcaggtgtgtctatcgcaaattgaatacaacgtgcaacttcttctgctgggatagcaagtgctgagtagaaaccagcaagattttctttgacggcttggtcactagcatgttgaggtaattctgtgtccacagccccaggtgaaataacagtaactctaacatttgatttagcagcagcttcttcttggcgaagcgcctcacttgccgcccaaaccccaaatttagtcgctgcgtaaacaccagttgttgctcctgattgatgtgccgaaagcgaggcaacattgataaaatgccctgatttttgttgacgcataatcggtaaagcagcgtcaatgccataaagtgttcctttgaggttgacgtcaatcatttgattccactcttctaccaaaccttttgagaattccgacaacggcatcaaccctgcattattaatccaaacatcaatacgtccataagaatctaaagcgaatttcgctatttcttgatttttgtccaattgggaaacatctgccaaaatgtattttgcttcgccaccttcggcttcaatacttgtcaccaattcttgaagtttattttcacgacgcgctacaagaattaacttgtgtccactcttagccaaagctttagccgcagctgcaccaattccagatgaagctccagtaatcacaataactttttcggttgttttttccatttttattagctcctttctgctttacactgtcagtataacaaactagagtaactctaagtcaagcttaaattgtcattttttatctgcgcacattttctttaaacctgcaacgatactttcttctggagtcacatactgataacggtagaattctggatacttcgttttataaattctctcacctgtcatgcgtttgacttggtctttgtaataacttgtctgacggaaaggttgccaacttgccaaaatatcttcaagtgaaatcaagcgaggtaaaccaccaaacagctctttaatttcttcgtcagtcaaggtttgcttcgttacattcaataattctgcaaaagatagtgtatagccaagtcctaatacccttttaccatttgctgctggattcgtcattaaagcaatttctaagtccgccacatctcgaacatccacacaatccatttgcccattgttaatcgtttctctgttagccaaattggcgtataccatatcatgttgccatggcgtaaaacttggtccaacaacattcatcgggtcaacaatgctaacaggaacattgcaaatttctgctaaatcaagaattcttttttcttcagcaacctttgccatcatgaatttatcataaggataatcgggtaaatttaaatccgtccaatcatcttcggttaagattaattttgcatcatcaacaatgccaaagccaaccgaaccacctgaaccaaggtgaacaattttttcgacagattgaatatgatttacgattttgaaaagatgattaatcgctaagatcttcgtagtcgcaaagtcttccaaactttgctcttttcctgtgaaaggcgccgtgttattaaaaatccatttaacatcagctaaaaatttgttcaatttttcttggtcactagttttcaaaatatcagcacgaatcccacgtatatgcgggagacgttgctgtaaatcatccattttctcttgattataatacgtcccaacaatattagtaaaaccttggtcgcttagttttttagctacccaagctcccatgtatcccgttatcccaagaatagcaattttatcctcttttttcataaatttattcctttctttgaagctactttcattataaaaccttagaccaactctaagtcaaggattttacctcaaaaaattaaaaaagctggcacaaaaatgctcagcttcatttgtttatgacataataatgctcaattcacactaacttgacctgaataataatcaaatgtcagtccgctttgcacatttggaacaaagacgttaaattctagactaccgtcagatgatttggcttccaaatgcgttccgcttgctaagagattatcaccatcgtaaatcaaggtaacacggtaacgaactcgtttattctggtcaagagctttgcggacaagggattcatagtaattttgaccagttgaactttccgaatttgcctcgtttgcccacgcggtctgtgttgccacattgtcagggttgcttgttgacgcatcaaagcctttcagaccaccaaccaaagcatagccaagcaaatgaccacgatctaccgcatggctataagtccctgaaaggtcttgaacttgatgccaaccagctggcgtccaagacgttgagccatttccagtctcctcacgacttttgtattgacgagttgacttacttagcaaagcattagcaaccgttggaacggtctgaccttgcaccgttttcgttttgttgttggcgtaaggttgacttgaaacttttgcatttagggatgtttgattatcattgataatataggctcccgcaccattccattctatatttgctcccaactgctctttgacactatctgttaataccgtctctgctaaagcttgtgttggcgttgctgaatcagaactcgattgatttgacgttatttcagaagaggagtcaccagtaattaacgaaacgacttgattgagcgggtcgttcgaatctgatatcgtcacccaaccagtaccaataccaactaacaaaatcaccaaagacagcagggattttgtctgtttagacaattttgatttctttgccataatttcctttcatcaaaaaagcggaaaaaccgttactttatttcaaatcataaagccgattatcccacttctaaataataattgttcctaagacaatcactaaaataaaccttattaatttccagtaaattttccaataatcgattgccatttatccaaagataaaattgcaaatggatttttgccttcaccaatgatgccatagccaatcatcaaaccaattgccaaaaataaacaacacaaaagagcaattaccaaaattaaaacgagttgtttggttacatatttccagccacttgtcatttttaagcctcacttacgcgtttaatatttgcaccgagtttagccaatttttcatggaatttataatacccacggtcaaggtgaaccaattttccgacagccgttgttcctttagcaaccattcctgtcaaaatcagagctgcactcgcacgaaggtccgttgacatcacaggtgctccttggagttctttaccaccgtgaatcatagccgtatctcgcaaaatttccgattgcaagcccatacggcgcatttcttccaaatgttggaaacgattctcaaaaacagtttcaatcatcgttgattcaccatctacgactgccatcaaggctgtaaactgtgcttgcatatccgttggaaaaccagggtgtggaagtgttttaaccgttacaggtcgcaatgttgacgtatcagcaatcacacgaataccatcctcctcatcaacaacagtaacccccatttcaatcaattttgaaatcaatggacggttatgttcccagatagcatctttgataagaacatttcctgatgtcatggctgctgccaccataaaagtaccagcctcaatacggtcttgaaccacatcatgttctgccccatgaaggctatcaacaccagtaatagtcaaagtttctgtaccagcacctctaacattagctcccattttattgagtagcattgccaaatcaacgatttccggctcacgtgccacattttcaataatcgtaacaccatctgctaaagtcgctgccatcatcaagttttgcgttgccccaacagacgggaaatccatgtagatagttgtccctttgagcttaccatcaacagttgccgtaatatcaccaccagattgcgtaatcttagctcccattgcctccaaacctttaaggtgaaggtcaattgggcggctaccaatcgtacaaccaccaggcattgaaaccttggcgtgtccattacgtgctaaaattggtcctaaaacaacgattgaagcacgcatcttactaacatactcgtaaggagcaatatccaaaatatcaccagaagcatccacttcgattttattgttagcttcatcaaaatcaacttgaatattcaacccacggacaacattattcatcgtaaaaacatctgaaaggattggaacattggttaaaattgtctttccttcctcaggtaaaattgttgcagccaagagtggaagaacagcatttttagctccttcaatcactacttctccttgcaaacgtgtattaccaccttcaataataattttatccaaaatgaactccattcttatattataatacctaaaattatatcatagtttacaaattattgcttttattgaaaactcaagaaaagagtttgactcattgtaatgatttctaggaaaaaatgactgacgagataaccaatagcaatgcttaaaaacaagataaatacttttagtcgtccaacgttttccgctgaatttttaatgattttagaccaatcaaacaactgacgaagcaattgatgtgtcatcgcaatgaacatcaaatgacacaaaatggtcacagtactatttaaaatttccataaccttattatagcaaaatttgcttctcacaacaaaaaaagccagcaaagctgaccttttaggattatttattaccaacactgatacggttcaaagcacgacgaagcgcaacttgtgcacggcgtacttcgtcaatatcgtgagtactttgagcttgttccaatttgcgttctgcgcgaatcttagcacgttctgcacggctaacatcaatatcgcgttcacgttctgcagagtctgcaacaattgtcacaagattgtctttcacttcaataataccaccgttgatagccacccaatccacgtgattatcatcatcaatacgacgaattttcatttcgtggacagtaagcggagcaatgaggttaatgtgttctggcaaaatccccatttcaccatctggtgtttttactgaaataaaattagcatggtgatcatagcggataccatctggtgttactacctgaacagtcatatatgtcatggtatcacctcattagtaattcattttcttagctttttcaactacatcctcgattggacctacgttacggaaagcatcttctggaagatcatcgtatttaccttccaaaatttctttgaagccacgaacagtttcagcaactggtacatatgaaccaggcatacctgtaaattgttcagcaacgttgaagttttgtgacaagaagaattggatacgacgtgcacgtccaaccaatgttttttcttcgtcagacaattcatccataccaaggattgcaatgatatcttgcaattcacggtaacgttgaaggacacgttgtacttctgttgccacttcatagtgttcttgaccaacaatttctggtgcaagggcacgtgagcttgaagcaagagggtcaacggctgggtagatacccatttgagtcaacttacgttcaaggttagttgttgaatccaagtgagcgaatgctgttgctggcgctgggtcagtgtagtcatcggctggcacatagatggcttggattgatgtaacagaaccttttttagttgatgtgatacgttcttgcaattgacccatttcagttgccaatgtaggttggtaaccaacggctgacggcatacgaccaagaagggctgatacttcagaacctgcttgagtgaaacggaagatgttatcaatgaagagaagcacgtcttgtccctcaacatcacggaaatattcagcgatagtcaaaccagtaagggcaacacgcatacgtgctccaggtggttcattcatttgaccaaagaccatggctgttttttcgataacgccagattctttcatttcccagtaaaggtcattaccttcacgtgtacgttccccaacaccagtaaatactgaaataccaccgtgttcttgggcaatgttatgaatcaattcttggataagaacggttttaccaacaccggcaccaccgaaaagtccaactttaccaccttttaggtaaggggcaagaaggtcaataactttgatacctgtttcaaggatttctgatgatgttgataattcatcaaaagctggtgcttttttgtggattggttcacgtggtgcgtcttcagcaaatggttcatcaaggtcaatagtatccccaagaacattgaacacacgacccaaagtttctttaccaactggcacactaatcgcacgaccagtatcaaaaacttctaatccacgtgtaagcccatcagttgattccatagcgatagtacgtacaagaccgtcaccaagttcaagagcaacttcgagaacgattttttgagatttatcgccatctttataaacaatcaatgcattattaatctcaggtaatttttccccagctgcaaacgcaacgtcaacaactggaccaacaacctgagcaattttgcctgagctcatgtttttctccttttagattttttaggaattcaatcccgttttcgtgagcgaattaaatactcacttttattctagtgcgttagcacctgctacaatttcaataatttcatttgtgatggttgcttgacgagcacggttatattgtgtcgttaagtcagcgataatgtttttagcattatcagtcgctgtctgcatagctgtcataccagctgcatgttcagcggttttcgcatcaacaatggcaccataaatgagactttcagtatattgtggtaagagttgttccaaaatcaattcacgacttggttctaactcaaaaccagttgtcccttcttctgccgcttcatcagcatctaattctgcaattggaagcatttgttggacacgaacttgacttgtcaagctgttcacatggtgattgtaacatacatataattcatcaaacaattcgtttttatacatttcaacagattttgaaatgatattgccgacttgttcaaatgatggctgatcttccaaaccacgcaattcaaatacaacattcataccacgtgctttaaagaaatctgctccgataccaccgatggcaataatagcataattatcatcttcagcatgatattcttgaataagatccatcatagctttcaagattttagaattatacccaccaacaagtcctttatcagatgtaatcacaatgtaacctgtctttttaactggacgtgcggctaacattggattttttgaaccattaataagttctgatttcaataaatccgtagtaatttgacgaatttttgaagcatagatttggaaatcttgtgctgcttgctcagatttagtcaattttgcagctgataccatttgcatggcaccagtgatatgacttgttttctgagttgaaataattttccctttgatttcactaagagagcctgccatatgctacctccctcttatttgaattctgactgatctttaaaggctttaatagctgcatctaagacagattcttctggtaaatctttggttgtacggatagtttcaaagattgattcgtaatgtgcatcaaagtaatcatacaaagcttcttcaaatgctaaaatgtcattaactggcacatcatccaagaaaccatgagtaagtgcataaagaatcacaacttgtttttcaacaggaagtggtttgtgaacaggttgtttaagcacttcaactgtacgacgtccacgattaagtttagcttgtgttgcggcatccaaatcagaaccgaattgtgtaaaggcttcaagttcacggtaagaagccaagtcaagacgaagggtaccagcaactttcttcattgctttgatttgtgctgaaccaccaacacgtgatactgaagaaccagcatcaatcgcaggacgaatacctgagttgaaaagattttcttgcaagaagatttgtccgtcagtgatagaaatcacgtttgttgcgatgtaagctgaaatatcaccagcttgtgtttcaataaatggaagggctgtgatagaaccaccaccaagtgcatcagaaactttagctgaacgttcaagtaagcggctgtgaagatagaaaacatcacctgggtaagcttcacgtcctggtggacgacgaagaagaagtgagagttcacgataagctaccgcttgttttgataaatcatcataaacaatcaaaacgtgttttccgttatacataaattcttctgccattgctacaccagcataaggagcgatgtaaagtaatggagaaggttgtgaagctgaggctgtcacaacgattgtataatcaagagcaccgtacttacgaagtgtttcaacttgtgtacgaacagttgattctttttgaccaatagcaacatagatacaaatcatatcttgtcctttttggttcaaaattgcatcaatcgcaacagatgttttacctgtttgacggtcaccgatgattaactcacgttgaccacgtccaattggaaccaaagcatcaatcgctttaagaccagtttggagtggttcagaaactgatttacgttgcataacgcctggtgcaggtgtttcaactggacgagttgcagttgtcttgatatctccaagaccatccactggttgaccaagtgggtttacgacacgaccaataagagcttcacctactggcacttccatgattttaccagtacgtttaacttcatcaccttcacgaattgtagaaaaatctccaagaataatgataccaacgtcattagactcaaggttttgagccataccgaaggcaccatttgaaaattcgagaagttctccactcatggcattatcaagtccacgagcacgggcaataccatcaccgatataagtgactacaccagtttctgtgacgtcaaaatttggctggaagttttcaatttgctttttaattaaagcgctaatttcttgtgcattaattgccaaaagtcacaccactttctatttcaaattcattttaaatgtttgtaattgacgacgaatgcttgtgtcgattactttattgttaacattaatgataaatccaccgaggattgattcgtcaatgttttcaacgagttttccagctttaacaccgaatttttcagcaaccaaagctagaatacgttctttttgttcatctgttaaagctaccgccgttgtcacaacaatgtcgtgttgattagttgcaataacaaaatctttttgaacaccttctaaaatatcttttaggaacgcttctcgttcgttttgtaaaattacctcaagaaaattgttcatatatactgaactagactcttgaagtaacctaacaagttttactttttcatcacgtgaaacgactaaacttgacaaaaagttagctaagtttgtctcttcaaaaacagacaacaaagcttctgtttctgattggagttcaactaaactgtctttttcaatagcaatttctacgagacttttcgcatattgctcaacaagagcttgtgtctttttatccattaggcatctcctagcttgtcaagatagctatcaatgagattgctttgagcttctttgtcaaggttagttgtcatgattttttctgctaaaagaacagtcaaatcagcaacatcactcttaacacttgaaagagcttctgctttactttgttcaatatcttgattagctttagctttcaagcggcttgcttcttcgcgtgcttctgcaacgattttagcctcttgatttttacctgtttctttggcatcatcaataatttgtgttgcctctgtacgagcaccagctaactcttcttggcgtttagcagctaatgcttctgctttttcacgagcagcttctgcgccatcaatatcgttagagattttttcttcacgagctttgaaaactcctgttaattgttcccaagcaaaaattttaatgagaacaagcaagagaagaaaagagccagttacgataataatgttaccaagacttgtactattgataagagttgacataatatactttctcctttcttattattcttcttcgtgatttacttttttaccaacataagttgatgacaacattacaaatacgtaagcttggattgctgagatgaaaattgagaaccctgtccaaagcatatttaaaataaatgcaaatggtacagctacgatattgtagtgtgcaaattgcacaagcaagctcaacacaatttcacccgcaaaaatattaccatacaaacgtaatgttaatgagataacattggtaaattcttcgagaatgttcatcggcaacattactggtgttggagataaatattcttttaggtattctttgataccattcttacgaataccttcaacatggacaacaacagcaatcagcaatgctaatccaaagttgtaggcagcgtttgaagttggagatgaccaaaggttatagtcaccgacttcaagttttgtaagtaaacctatgttattggcaatcaataagaaaaagaacaatccaaagaagaggagactgtaattgctagtataacgtccaagattaggcctaatgattccttgaacgaactcatatacccactctaaaacattttgttttccttttggttttagttgcatattgcggctgaaccaaaaaataagaacaaaggctactagcaccgtcaagagagacatcgcgagaatggtcaagtcgaactcaataccaaagaattgcgctgttggatttacagatgtttccaactctacccctccttctttttatagattctttgttaggtttaaccaacgaagaatgttgatgcaagaagaacgaagaaagtaccttcaataaaggctacccccatgatcataagggtttgcaatttgctgtacatttctggttgacgtgcagcagatttagcgatgttggcaacgaggataccttcaccaagactaacccctagtacggcgataccaagtgctaagatttttaaattcaacatgatatgaatctccttttaaaattttttacctcgttattttagtcctattttaggaaattgtcaatgaaatcgcgatttttggaaacgtttttctatttcattcttaacctttgtttagttttttcaaataaaaataaagaaacgaccaaaatcgcttctttattagggttttcttcctattataaataacattttatgggagtttttctatacaaacaatgtcctaaaaaggacttctttgtgaaaactctatggaaatgttttcatatttttactaaatcaagtaggtaagaacctcatttttagtttttcaattgccatatttctttagcgtattgagtaatggtatcatctgaggtgaacttgtcagaatttgcaatattgataaggctcatgcgcatccattgctcttgattgcggtagagctggtcaatcttttcttgggcttccacataggctgtgaaatcttcaagcaagaaatactcatcattgtgcgtaatcagagattcataaatttctgttccttcaccttgaatatttggaatggtaccattgataaagctgtcaacaacacgtcgaataatcggattattttcataaatactacgtgaatagtaatcatggcgttcataatgacgatagacatcatctttatccataccaaagatgacaatattatcgctgccaacttcatctttaatttcaatattagctccgtccagtgttgccaaggtaatggcacctgtcatcataaacttcatgttagaggttccagatgcttctttggaagctagtgaaatttgttcagatacatttgctgctggtataattaattccgcaaggctgacattataattttcaaggaaaacaactttaagtttgccatttaagctactatcgttattgattaaattagctaattcattaatcactttgatgactgattttgcaaaatggtagcctggtgctgcttttgcaccgaaaatgtaaacatgcggtacgatatctttatcaggattgtcttttaaatcccaatattgtttgataatattgagaacatttaacagttggcgtttataggcatgcaggcgtttgacttgaacatcaaagatagcatctgttgaaacttctatacctgttgtttctttaatataagcagccaaacgtgctttagcttcttgtttaacgtgataaaaatcatttaaaacttctggattgtcaacaaggtcattaagcttacgcaattcatggatatcacttctccagccactgccaatccatttgtcaatggttttagaaagtggttgatctgcgatttgtgtccaacgacgttgaacgataccattggttttattattgaatttttcaggatagagattatagaaatcacgtaaagtatcttccttcaggagttctgtgtgaagtttagcaacaccgttgacagaataaccaccgataatagctagattagccatgtgaatcaagccgtcttttacaatacgtgtattttcaataatctgaggagcaacgccatcgcttgccatgtctgaaacaaaacggttatcgatttcaagaataatttgatagacacgtggcaagacttttttgaaaagttcggcatcccatttttcgagagcttctgcgagaatggtatggttggtgtaactcattgtctttgttgtaacatcccaagcaacatcccattcaaggcgatactcatcaacaagcagacgcataaactcggcaggtgcgacagcagggtgagtgtcattgatatgaacagaaactttttcatgaattttttccaatggcaacccttgtttgaggtatgatttaatgattgtttgcaatccagcgcttgtcataaagtattcttgcaccaagcgcaattgtttcccttcgtagcttgaatcgtctggataaaggatagaggtaatgtcttgaacacttcgacggtcagcaattgttgggtaatcgagctcgtattcttctggaatttcgacatcccaaaggcgtagattattgacaatatcattttgatagccgagttgcggaacatcatatggcaccgcacgcaaaatttgggcattgttgtaaactgggctaagtttgccgtccttatcagcctgcaaatacacatcaccaaacaacttgacttcaacggtatcatggtcttttcgggtttcccaaacatttccgatagaaccaaaccatgaatctggcaattcaacttggtaaccatcaacaatgcgttgcttaaataaaccgtatttgtaacgcaagccattaccaaaacctggataacctgtcgttgctagtgaatccatgaatgctgccgctaaacgtcctaagccaccatttcctaatgccatatcatgctctgcatttttcacagcgtcaaaatcaacattcaattcagcaaaagcttctttgacaatatctaaaataccaagattcagtaaattagtttcaagcatgcgtcctggtagaaattcaattgaaaaatagtaagcaactttttcatgattttcagaaatttttcggttgcgttctagccagagaggtgtgtaatatttgcgtaccgtttgagcgagtgaggtaaaaagttccgcaggcgtcgcatcgggaactttaatcaattgttcttcgtggagtgtgtctttaaaatcgcgaataaattcttcttttgttaacttcatgttaatccttttcttgattaatctaattgttcatacaaatcttcataagctttacttgcggtatcccacgaaaaatcagttgtcatcgcatttttttgcaacattgaccaatcttctttattgctataatagaggtcaacagctttttctaccgttctcgttaaccagtaacctgaaaaatcttggaaaccgaaacctgttccagttttttcatattggttataagggctaacggtgtcacgtaagccaccaacttcatgtaccaacggcaatgttccataacgcattgccatcatttgtgacaatccgcaaggttcaaaagcacttggcataaggaaaatatcgctagctgcatagatttgttgggcgagttcaatatcaaaggtgatattggctgacattttatctgggaaggcactgccaaaccaagcaaagctattttcaaattcagtataacctgttcctaaaagcacgacttgtagatcaaaatgcaaaatattattaagctcattgaccaccaaatcaaagcctttttggtctgttagacgagatacaattccaatcaaaggaacgtcatcacgaacaggcaaaccaacacgttcttgaagagctctcttatctttagcttttccagacaaatccttgacagaaaaatgttcaggaatgtgtgggtctgtttctggattgtacaaatcggtatcaataccatttgtgataccaatcaatttgccactttccatgcgcagaatttggtccaaacctttaccaaaagcaggtgtcatgatttcttgggcatatgacggtgaaacagtcgtcacacggtctgaatataaaattcccgcttttagccagttaaggcagtcattccaacgtagtgtaccgtcagcataacgttcataaccgacaccaaataaatcgccaagcatgccagagtcgtattgaccttggaattccaaattatgaatggtcaaaacggttttaatatctttataggcattaatccagtgatatttttcttttagtaaaaacggaatcatggcagtatggtaatcatgaacatggacaacatcagggataaagtcaactttttccatcaactcaatagctgctaattggaagaaagcaaagcgttctccgtcatcccaatcaccataaatatgaccacgataaaaataatattggttatctaaaaagtagaaagtgacattttctttaacaatgcgtttaacaccaacatactgatgacgccatcctacttctgtgtaataatacaaaacatcttcgatttgatcgccgaatttagcatcaatcatatcataataagggagaacaacagcaacttcattgccatttttaacaagagatttaggcaatgccccaatgacatcacctaatcctcctgttttagcaaatggagctccctccgctgctacaaacaaaattttcattgaattacatcctcagttacttctaaaccttttttaataacaattggattttctttgctaccacgaataacaactcctggagcaatgacaacatttttatcgacaatagcattttcaatgactgccccttcgccaattgttacttttggaaagaggatactgccgataacacgtgaacctgatgcaacatggcaatttctggaaacgattgagtattcgacgtctccttttataatactaccagatgcaaattgagaattcttaatgtttgattcttcggcaaaatatgttgcctcttcatttttaactttagtataaaccttttggttagaatagagaagtgaatagaatttttgagtattgagcatatccatattggcatcgtaataagatttgactgagcaaatattagaaagataaccagtatattcaaatgctaaagcattatttgaaacgattaattcacgtaagagataacgaagcttgcgtggttggtctttttgagcttcttcttccattttggcgatgagccatggtgtgtcaatgacataaatgtcagctgacattttttgcaagtcaagactgtcattaacatctgctcttccgacaacatggtctgtttcgtcaatttctaaaatttcatttgcttctgaaatgctttcttttggcattttcttataaacaacagtgattggtccgtcgttgttaacgtcgtgcagatgaatgacttgttccaaatcgatattacacaaaatatcacagttcatgtaaaccgtttggtcactaccagagcgtttcaggtaagtcaaaacttgttcatagtaatctttgtctgcaaattcactatcgttactattattgtaaaatcctaggaaatagtggcttaacaaggtattaagtccccattcacgaccgcttctgacatggtcaaaaactgaacgaatattttgaccacggaaaatcgcataaatgctacggatgcccgcattagcaagatttgacaattggaagtcaatcaagcgatattttccgtcaaatggcaaatttgccaaaggacgcttttcagttaacgttgacatatcgtgatagcccactgcatttcccaaaatcgcagtatatttatcaatcttcatttggcacccccactacttcattataaccaacaacttgtacttctttgcctgttccgtcaatttcaacaccatcaccaatgacagcattttcgccaacgattgcacgtttaattttagccccttcaccaataattgcgccactcatgatgaaagaatcagtgatttcagcatctttcttaacctgaacattcgttgaaagaatagaatggttaactttccctgaaacaaagcaaccgtcaacaacgagagaatttttcacgctggcttcttcagtaataaagtttggtggtgcgataaggtttttagagtaaattttccaagaacggtcacgactgtgcaattcattgtcttcgccaatatattccatattagcttcccaaagtgattcaatggttccaacatctttccagtaaccatcaaaattataagtgtaaacacggtcaccagcttcgagataagcaggaatgacatttttaccaaagtcagacatgtcaacattgttcttttcagcatttacaagcacttcacgcaaacgttgccaattgaaaatataaatccccatagatgctttagtagattttggatgttctggtttttcttcaaattcaacaatgcgatcgtttgagtctgtgttcataataccaaaacgacttgcttctttaagcggtacatcaataaccgcaacagtcaaactggctaaattatctttatgtgtccgaagcatgtcatcataatccatcttgtaaatatggtcaccagatagaataaggacatattctgggtcaatggaatcaatataatcaatgttttgataaatagcatgacttgttccttcaaaccaacgattaccttcagttgctgagtatggttgaagaatagttgctcctgagttaatcccatcaataccccagttcgaaccatttccaacgtggctatttaatactaacggttgatattgtgtaatgataccaacattatcgactcctgagttagcacaatttgaaagtgcaaagtcaataatacgataacgtccaccaaattgaacagctggctttgcaatgttttgtgtcaattttccaagacgtgttccttgtccccctgcgaggatgagtgctaacatttcatttttcattctattttcctttcttaggaatctgttttgccaaacgtcgttttattttccacatactggcaccgagtgcaggtaaggtgaaacttaacgtatgatggtaattcttccaaagtctatcttgtgtgcgagcttggagattatgttctttccagacaccaccaaattcttccatttctgtattccaaacttcttcgtaaatgcctgcaactggaactccaattgtaaagtctttacgttcaacgggcaccatgttaaacacacaaattaaaatatcgccgtctttgtttttacgaatgaaggatagaacggtctggtcagtattgtctgcatcaatgatttcgataccgtcatagctatcatctatttgccacaagacattgtgctctttgtagaatgcattcagttgacttgtgaaatcttgcaatttcttgtttaagtcatcttccaaattaacccactctagctgatagtcatatttccattcaaggaattgaccaaattcacttcccataaagagcaattttttgcctggatgacagatttgataggtataaagattacgaagcccagcaaattgattgtaacggtcaccccacattttatgcatcaagcttttctttccgtgaaccacttcatcgtgtgagaatggtaggataaagttttcagaaaaagcatacataaaactaaatgtgacaagattaaaatcatacttacgataaatgggatcttcttcatagaatttcaaaatatcattcatccatcccatattccatttataatcaaagccgagtgcatcgtattcaataggacctgtaattttagtgtcactggtactttcttcagcaatcatcatgatatcaggataaaagcttttcaaaacggcatttagtttttgtaagaaataatacccctcataattacggttaccaccatctttatttggtgtccaaggtccaatatcatagtcacgatacagcatgttacttacggcatccactcgaataccatctaagtgataataatctatccaaaacttggcactagaaattaagaaagactgaacttgattttttccaaggtcaaaatttagagcgccccaaccgcggttatgagctcggtcttcatcctcgtactcaaacgttggcgttccatcaaaataagccaaagcatcatcattaatcgtaaaatgtcctggaacccaatccacaatgacaccgatattattcaaatgacaagtttcaacgaaattttggaaatcctctggcgttccataactatgctcgaaagcaaagtaccccattagttggtaaccccaactcatcccaagcggatgtgccattaacggcatgaattcaacgtgcgtgtaattcatcttaaccaaataaggaatcaattcttctgttaattccttaaattgataaggacgaccatcatcatgttgtttccatgaacctgcatgcacttcatagatattaacaggacgattacggaaaccgaaacgtttgcgtcgccctaaccaaagtgcatctttccacttcttttctggaaaatctgtaagaactgctgctgtccctggtcgcttttcgaaataaatagcaaatgggtctaatttttcaacttcttgaccagtcgaacgttttacaagatacttgtaaagttgattttctttaggtaaatccgtaaaaatttcccatacacctgcttcgttgcgttccatagcaagcggattttctctccattgagtgaaatcaccaatcagatgaacagattgagcgttgggtgcccagactctaaaactgtaaccttcggtaccattacgagtttctttatgaaagccaaagtaatgttgcgcatgaaaattttcacccgttccaaaagttctcagtgcctctttcgtgtccatcatatcacccctcccttttatttattaaatataaagctccagaaaagcaaaaatagccctagaatagggctatttctcgatttcaaagatcgaaacagacaaagcttcaagcttatcatttttataatgtaagcgctttatatttgtaattattatagcatatttagaaacgtctgtcatgtagttttcaagatttttttcattttcattaaaaataatacgatagtttttttcacctaaaatgtcaaaaacaacgataccatcgtaatcattggctacatgaacataaacatggtctcttatttctttataactttgataagaaaatgcgggattggtgcgttttaaatgaataattcctctcataaaagcaatcgttgcatggtgttctgtcacattatcccaatcaatctgattgacacgatcaggggcattgtagctattcatcgccaattgtttgtctgaagaggttaattgtccattatttcctgttgggtacaattttgtgcgtagaaattcttgaccgatttgcataaaagcaacaccttgcatcaaaacattcatcgctgaagccatttcaattcgtctagtgtgcgtttcttggctatcatcagggtgcaattcccacatcaggtcatttaaattgtaattatcgtgagcttcgacataattaatgacttgattcggtgtcaaatatgatgacaattcatcacttcctaaaacacctttggcaataatgccttcagttgcggcacctgaaacaaaaccatgcttgaattgcccatagacttctgctccttttatgccgtctcgaacattatcgttgaaaaatccaatatttggcatttgataagcattgtcttttttggctttttgttctggcaaaagtcctgttcccatgtcccagccctcgccatacatcatcaaacgtggatcaatatcatctagcgcttgacgaatggcattcattgtttcaatgtcatgcaagcccattaaatcaaaacgaaagccgtcaatattgtactcattcacccagtacaagacagaatcaatcatgtacttgcgaaacatttctttttcgctggctgtttcatttccacaacctgagccgtcttggaatgaaccgtcagcattcattcgataaaaataatctggaaccgttaattggaaagcagaattataggacgaataggtgtgattatataccacatccataatgactgcaatgcccgcatcatgataagcttgaattaattgttttaattccaaaatcctattttctggtttatgcggtgccgttgaaaagctagcttcagggacgttgaaattttcagggtcatatccccagttataggcataatttccgtcggcatcgaaggtctgatgatggtcaaaaatcggctgtaattgaacatggctaatgcctaattttttcaaataatcaaaacctgtctcatcaccatatgaattatgcgtgccagattgacacgcacctaaaaatttaccacgatatgattcagcaactcctgaagttgatgattttgaaaaatcacgaatatgtaattcagtaatcactgcttggttaggattatctagtcgccagtaagcttccttaccctgtttgacagaaaatcctttgggatttaggtgttctggggccaaaataacggaacgtctaccgtttgccgtagtggcaatagaatacgggtcacgtgtatcttgaaatgtcttatcacgataataaacacggtaagcataagcttggtaattcaaatcatgctcaatggtcgcaaaccaaacaccgtgcgtattatagaggtgattatccagattgataatgtcaccgcgttccattgggacgatataatcaatacttgatttatcgtcggttgtttgatagaaaatcaaatcaaccttagctgccgttggcgcccagagacgaaactcggttttttctttttggtactgataaccaagccacccttgaaatccccattgataatcaaaatactgataattcattgccatatcaaaggcatgactatcacgatgactataataatgactagtgattgccgcttgatgtgaataataaagcgtatcatccccctctacaatccatacttctgtcttagggacaccactattgcgttgaattctaaaatctcttgtcttgatggaccaattatgatttttgacaatcacataaatgtgctccaaaaagaatggactatctatcgttagatttcctactaagccaaaactatcaaatcctgagaattgactgtctgttccttcatgaaagtcaatccatttccacaaactatagtcaaaataattgccatgctggctatgataatgaacgataactgtatttttcataggttcgccctcaatttctattcttctgaattgagctcatcaacttcctgtgtgaatttttgggcaatagcttccaaagctaaatcttcttgattccaaacgagcgcatcatctgaaatttcatctgtattagcaaagaatgtgatgtgatttttgagattacggagcttaattggagcgtcaccaccgtactcaccgtccaaattaatcatcatcttcttatcagataacggttcgatttccaagaaatcagtcttgatatactcgatacgtttgtcaccaatgtgttttccgccgtctaataccaaacgaatcaaacgtaaaatttcaatcaagttagctgtcttaaccaagatcaaggtgaattttccgtcgtctagcttagcatctggcgcaatttgttcaaaaccaccgactgaattggtaatggcagcgaaaatcattgaaacgtcgccttcaaaagtacctttttcgtgtttaatacgaacgggaaccgtacgaattcctggtagcaattcaacaccttttgccaaataagccaaatacccaaacattgtctttaattggcttggcacactatatgttaattctgtgaatgagcctgcggcagcaatattgatgaaatacgtatcttcacgcgcttgtccaatatccatttgaatggtttgatttttaccaataatcttagctgcttcaactggattaccacgtggaatttttagagcgcgcgcgaaatcattggtcgttcccgtcggaataatagccatttgagggcgtttagaaagcggagcaatcccgttgacgacttcgttgattgtaccgtcaccgccagcagcaatcaccaaatcaaatccagcttctgcggcacgtttagcctcatcacgagcagaatttggctctggtgttgtctgaaaagctgatgtttcataaccaaaaccttctaaaacatctagcacttctgccacgtttttcttcatgatttcctgacctgaagtcggattgtagattaaacgtgcacgtttttgtttcttagccataaaaatacctcaacttgtttataaactttctaaccaagcttcatcgcgaacatcaattcctaaagcttgggctttggtcaattttgaacctgcatctgtacctgcgacaacaatgtccgtctttttggacacgctgttggtcacttttgctcctaaatcttgcagtttttcttttgcttcgtttcgtgttaaacgttccaattttccagtcaaaacaactgttaaacctgctaattgagcatcttttgaaacttttttaccaagataagcaaagttgacacctgcatttttcaattcatgcaagagctctgtcgcttcttttttggcaaaatagctgcgcaatgagttagcaataactgttcccaaaccgtcgatactagcaatgctgtcagcatccgcagcaaccaattggtcaatcgtttcaaaaacttccaacaattgacgactagccttggcaccgacatgacgaattcccagtccaaaaagcaatttatcagctgaattttccttagaaacctgaatggcattgtaaagtttttcagcagatttttccttaaagccatccaagcttagcaaatcttccaccgttaattggtaaatgtctgcgacatcatgaaccaattctgctttgaaaagtttcttaacgatagaaggtcctaaacctgtgatattcatggcatcacggctggcaaaatgcgttaaacgttcttgaatttgacttggacaaagcggattgatacaacgtaaagccacctcatcttcatagtgaatcaactcactaccacaagacggacagctttcaggaatcggcattggtacttgcttatcacgtttgctatcaacaacatgcagcaccgctggaataatatctcccgccttatagacgataaccgtatcgccaatgcgaatatctttttcagcaatgtaatccacattatgcaaagtcgcacggctaaccgttgttcctgctaactgaacagggctaagattagcggttggtgtcaccaccccagtacgtccaacagtccaatcaaccgaaagaatttctgcttctttttcctcagccgggaatttataagcaattgcccaacgaggcgccttgaccgtaaagccaagttcttcttgcatagcaagactattgaccttaataacaataccgtcaatatcgtatggtaaattatcacgctcagcggctacttcttggataaatttccagatgtctgccattgaagatgtcgtgatacgtcgcggattaaccgaaaaaccatagcgagacaattcttctaaaacatcattttgcgttgtcatactagttgatgccacttcttgataaagaaatgttgccaaatttcgcttagcaacaactactgtatttaactgacgtaatgtccctgcagccgcatttctcggattcgcaaattctgtctgaccactatcacgacgttcctcattgattttatcaaatgacgcctttggcaaataagcttcaccacgaactgtaatgttaagtggctgtgccaatttatgaggaatgtccttgatacgtttgacattttcagtgatattttcaccaactgagccgtcaccacgagtggcaccgacttgcaacacgccatcaacataaactagtgaaattgacaaaccatcaattttcagctctgccatgtaagaggcattgggaaattcagctttcacacgacggtcaaactcctctaattcctcacgtgaaaaagcatcttgcaagctataaagcggtgtttcatgctgatatttttcaaaaccatctaaaacaagcccacccacttcttgcgttggactatttggcaaaatcaactctggatgagctttttcaagctcgactaactcgcgataaagcttgtcatattcgctatctgagaccgttggttggtcctctgtgtaatactcttttcggtactggttgagctcatcaaccaattcttgaatacgttttttcatattactattttaacatatctggtaaaaaatgctctccaaaagctaactattttttaagaattttactaaataaaaaactccctaaaaaggaagtttttaatctatcatacagttaaatcaatacgttttccaagtctgtccatgataatagcaccaatcaatagcgaagcaagttcgcctactgctgatgtaaaccaagtcatcaaaaatggtgagccaccaacataatataattctagcgcaatagtaaacattgaagccgaaaacaataatgaaaagtaaaagaatgctttgttaaataagccgttaaataaatattgctccttataacggtcaaataaaataacacctaatgttagaaaaacaaacgtttggctaccaccaacaaagacatcaattaaaccaaagctgtacaaattggcaatcatacaaccaagcgtcagcccaacaatatacttacgattgtaaaatgccataaacgctaacatttccgaaacacggaactgataagcaccataagaaatggcgtttaaaggcggtgtgactgtcaacacaatataaagtgcagcaacaagcgctacttgcgcaaaatcacgaatagtaaaatgtttcataaaaaatttttctcctttaacgttaaagagcgacaactcttcacgtctataatatgcttgacgaaagggaactaagcgtcaagggttgtttgcacaacgcttaaaagtatagcacaaattgttaaaatttggtatagtagttctatgaaaaagttattatctagtgaagtttttaaatacttatttttcggtgttcttgccacactcgtttacatgggaacacgcttagtcatctttgccctaacgcaatcggcaacgacttccgcagttatcgctaacgtcattgctatcgtgtttgccttctttacaaacgactacttcgtctttaatcaagttcgaacaggctggtttaaccgttttgtcaaattttttgtcgcgcgtctatcaacgcttgccctagacttgattttagcttaccttttagtcacaaaattccctcacattatcggacaatttgtcaatgataatatttcattagtcaacatgattgagactgttttctcacaagtccttatcatcgttttaaactatgtgtttagtaaattattaatttttaaagataaaaaataacacccccacaggtgttatttttttgtatctttatcttgtttgcggtgtgttagaatggaaagaatgtcaccacgtctgctttccatttttccttgacgtaattcttgataggttgcattaaagatagcccccaaaatcaaaatgtgcgcgaggaaaataaaccataacattaaaacaaaaatcacaaccgaaccaaatgttttaatgtcaaccatgcgttcaaaggttctcaaaatataattgctaaacaaattattcaagaacacaatgacgaaagaggtgaaaattgtccctggtaaaatgtaacgaaaacgtctgattttgacatttggcagaatgaaatacaataacatcaacccaaatacaatcgtcaaaacagttaccggttgggacaaattcagaacgactgttgcaaccgtatcactcaaatcatagtgagcgctgatgatttgcaaagcagcctttgaaaaagtagaaaagattaacacgaacgtcaataggaaaagaatgagcaagcttgccaaaaccccaatcaaacgcccaatcacaaaatctctgtgttgtgaaacaccataagctttgttaatggctttttgtagagaggtcagcgatttagacattgtccagaaagccgttaaagtcgcaactcccaaaatactaccagaaggttttgaaaaaatatctgtcgtaattgccgaaacagaggggtaaagattggtcggtaaatttttttccataaaagacaataacactgaaatatcaatgttaagataaggaaagatatttgccgcaatcacaatcaatgggaatgctgtcagcaataaataataagcgacagcaatcgctgatagatcaatctctgcacttcggtaatgttttaaataaacctgtagcggttgccactctaatctagacactaatttgtctataagctgcttacgattcatcctagtaagttctttcttctccttgacttgttaaaataacaggtccgtctttggtgataacaaattgatgttcgtattggcatgacaaaccgccgtcaagcgtcttatgagcccacccagttttcatgtccgtatcaatttcccaagttcctgtattaatcattggctcgatagtcaacaccataccttcacgcaaacggagaccacgacctgctttaccatagtgtggtaccattggttcttcgtgcattgttggaccaacaccgtgtcctactaaatcacgaacaacaccatatccacggctttcagcatattcttgaatagctgcgccaatatcaccgatacggttaccaacaacagctttttcaattccgatataaaggcattctttggtaacatccatcagatttttgacttcgtcagacacctcaccaacagcatatgcccaacatgagtctgccaatccaccagagtatgattcagtgtattttttaacttgtgcgacattgtcaaagtttaattttgaaacgtcaacaactgatttatcaagtggttcgctcaaaaccatatcaactttaagcaaatccccttcttttaaaatgtaatggcgaggaaaagcgtgtgccacttcgtcattaagtccgcaacatgtggcataaggatagtccatgatagaaccatcaaccccgatttggagtggaagaacgtttgcttctttacagcgacgacgaacgtattcttcgacttcccacatatcaagacctggtttaatcaattcacgtaaaccgatgtgaactgaagctagaaaatctccagcgcggtccattgcttcaatttcacgagctgattttaatgtaatcatatcaataatatactcctattagtaatctctaaaaatgcatcaataacactaattatacactgatagtcaccaaactgtcaaaaatggaatgattttgtcatttaaggtaaccattaattaattaattaattttcgttgttaccaaggctttggcgacgatttgttcctctaaaagaatttcaaagtcaatcaccgaactgcgacgtttttcagtaatgacacgtgggcgaatcaccaaacaatcgtcaatctgaactgcttgtacaaaataaagcatcagttgttcaatgatgatatttttttgatgttttttggtcaaaacacgaacactgatatctttgataaattctgttaagacaccttgggcaaaatttccagcattgtcaatcatcgcaggttcaaccacaaatttgtaaacaccatcttcgtattgcaaatttgataaaatctggtcgctgtatgtataaaggttagaatgttgtagatttggcagattttcaaccgcctggcggcgtgtaataacccctagcaaggtcaaatcctctgctacaacaggaagcatattcaaatcttcaaaaatcattttctggctgatattagcaagactggcttgcggttttgccacaatcagattacgtgacatgatactcttgatatcaagatgattttccttgccaacaacgtctagcatactaacaacgccgataaccacatttttactatttacaacagggaaacgcacatttgccgtttgtttaatcatcgcattaaattcacgaatcgtatcgccttcctgcaaaaagccatagtcttccttagtctgatagacttgctcaacagtcgtcaaatccgttttaattcgaatatttgaaagggcatggttaatcatcgtcgccacggtaaaagtgtcatagtgcgtgaccatgacagggattccgagctcgtcagcgacacgaaccacctcatcagaaacaggaaatccccccgttactagaatggcattatgtttttcaagcgccaacagttgaatattttcacggtcgccgacaatcaaaagtccacctttgacaaggtaacgtaaaatattttcttgagtcatcgcaccaattgaaaacttgctaaattcacgactaagcccagccttacctgccagaacctcagagtcactaatgcgagcaatttctgaataggttaaacgctcaatgcgaacagctggctttttctcgatacgaaccgtaccactacgcggtcttgtttcaacaatgccacggttttcggcttccttaatcgcacgataagccgtaccgtcactcacttttaagtgatttgaaatgcttcgcacactcacgcgctttccaactggaagattctccaaatactctaaaattttctgatgtttactcataacgataatcacctttactgatttgataatcaacgtaatctcgcattttgcgtgtataacggtcacttcctttgaagcgttgtttcaatttgaaacctgatttttgcgcaacacgttgactagccaaattttcttcatgggcaataacatgtaattctttaaagccaaattcctgaaagcttaaaaaacataaggttttcaagctttctgtcatcaagccttgtccccaaaactgttgattcaaaaaatagccaatttctgcagatgaacgattcaaatctatcttctcaaatcgaatacagccaatcattttatgagattttttatcttcaattgcccaaaccccaagtggctctttcatgaaataatgaaccattagataatcactttcatggtgactagctcgacttggaaaaataaaccgaagattatcaggattgctacaaatctcaaaaaagtcctgactatccttataggcaaaagggcgtaaatacatgcgctctgtctcaaaaaacgcataacgtcccaaacgtgtccaaatatccatagctctattatatcacaagaggttctaattttgtctctagctatctgaccacgcgcgacaaaaaagaagcccttaggcttcttcttaatcttcaattaatttaatatcagcgcctagggctgttaatttttcaatgatatttgaataaccgcgcaaaataaattcaacgttggtaatttctgtttgaccttctgccattagacctgcaataacaagcgctgcacctgcacgcaaatcagacgctttaacaggagctcctgttaatttattaggtccctgataagcaatacgaccaccaacaatagaaatatcagcacccattcgtaccaattcggcaacgtgattagtacgtttttcataaatggtatctagaatagtaccacgtccctcagctgtcaacaacaacggtgtgattggctgttgcaaatcagtcgcaaaacctggatatggtgacgttttcactgatacggctttcaatactgattgtttttcaacaaagatagaatcctcttcaaccgtcatacgaacgcccatttcttcgagttttgcaatgtaactctctaagtgttcataaaggacattggtaatacgaaccccttcacccattgctgctgccatggcaatataagtaccagcttcaatacggtcaggaatgacttggtgacgtgtgccatgaaggtaatcaacaccttcaattgtaatcacatctgtaccagcaccacgaatgtgagctcccatattgtttaacaaagtagctacgtcaatgatttctggctcacgtgcagcattttcaataatcgtacgaccatttgccttagttgctgcaagcatcgtattaatcgttgctccaacactaaccgtatccatatagatatgtgcaccatgaatagactcaccatttgtcgccaaacgcatcgcttcgccttcatacgaaatcgtagctcccatggcttcaaaagctttaaggtgcaaatcaataggacgaggtccaaggtcacaaccacctggaagacctactgtagcctcaccaaaacgacttaacaaactaccatagaaataataagaggcacgtaaactattaatcttaccataaggcattggttgattttttatgccacgtggatcaatttcaagggtatcttcttctcttttcactttggcgcccatgatttccatgatttcaattaaactatcaacatcggaaatggcaggaacgccatctaatatgacaatatcatctgcaagaatagctgcaggaatcaaagcaactacactattctttgcacctgaaatagcaacctcaccttttaaaggcttgccaccattaattacaattttacgcatacattcaaaactttctgctagaattcaaccttttcattttaacacatattattcaaattgacaaactgaatgagcagattgtatgtggtaaaattttttagattcgaatatttaagtaaaatcgcaagattttagcagtatcatcacacctatatgtgtcaagttaagtttttaaatcccaaaacaattttgatatctatttattcctaatgataatgctataaaattgtcaatcttgttgcaaaaaagaaataatttctttgatggcaggcaaaatattgtcaatttgacaatgtaataccccaccagtttctttatcaaataatttacttgtaacgcttttagcattgaccaattcttttgttaactctcctaaacgttctttaggaacatacatatcctcgctccctgccaataataagcaatcttgtgtcaccttattggcatatccttgtaaggaatgttgggaaatattttcaataaagtcaaaataagttttctcgcctgtaatatcagtaccgtgttgaagcatccattttaatgagaaatcgttattagcacgccatttcagaattgaattaataagatatttctgtctaaaaaacaatgcttgtttcaagaaaaaatattctaatgtcgtggtttgtaacttcagcgtatccaaagccgaataaaaaatatcaaagcaaacacaacgctctaaacgtttttcaaacgctgctgctctaagaacaaaatagccaccccacgagataccaatagcatcagctgtctctaatttaaaataatcaagaactgtcgtaacaactttttcatagtttgcttcaaaatatatcttttgaaatggtaccgagccttgcccaggaccatcaaataaaataatattagcattgatctcattttgtaacggtaaaaaccacgcaaccaattcttctgcaaaagagtcaaaacctcctataacaattaaagttctatccgctccttttttaggcataaaaatagcaggcaactttcccttaccataaggaatagcaaaataatttaaatgatatggctgatagtacatttcaaaacatcgtctaaatgacttataagcttcgtattttctgtaatcagagaagctaaggtagaataaagaagctctataataggtcattgccacttcaattaagtgattatcttcataaaatgttgccctactgtaccaccaagcataccatgtttcaaaatcactaatcgcttctcccattacttttaaatcttggcttacttctgggtatctttttctcaattcacctgtaaaacgtaagatttgaaaatcaaactgtttaatccctgtaattgtttcaatcattgtaattattcctccctttttaccaaaaatatgctacaatgaaggcacatttttagcataacaattttttaatgaaaaacaactttgaaactagaagtgccataaatttgttataaagtagcacataattgaacacaagtcacgaactgtgacaaataggagagcttaaatgaacggtaaaaaagaacaaatcttagtctctaaatctaaaattatcgaaggcactttccgtttgttaaaactgtacacctttgatgaattgacacttaatgaaattttagatgaagcaaatatttcaaaacgtaccttttatcgttatttttcaaataaacaagatatcttaaattactattatgatgattttattacaaattattgctcattagaaagtgagattttacaccaatcaagtttaaacggagtattaggcgtcactcttgattatttctatcaaaatcgccattacctgcgcctacttatcaaaaatcaaaaattttatttactccttgagaaattcaaccgtgcagctgtccgtatttatcaatctattgatgctccttggcatattaaagcgaaaacaccattagaactcacagacagcttactttttattgtcggtggttattctaatattatttcttcttggttaaccgaagaaaacccgcgtaatccacaagaaattgcagaacacattaacaatatatttatcaatgtttcacggaatctagaattataacaataaaaaagctggttacaaccagctttttttatttcactgcttctttcaaagcttctactttatcaagtttttcccatgggaggtcaatatctgtacgtcccatatgtccatatgcagccgtttgacggtaaattggacgtttcaaatcaagcatttgaatgattcctgccgggcgaaggtcaaaaacttcacgaacagcagcttccaatttgctttcagcaacggtattagtgccaaatgtatccacacgaactgagacaggttgcgctacaccgatagcatatgccaattgcacttctgctttagtggcaaaaccagcagcaacaatatttttagcaatataacgcgcagcatatgaggctgaacggtccacttttgtcgcatctttaccagagaaagcaccaccaccatgacgcgcatagccaccataagtatcaacaataatcttacgaccagtcaaaccagagtcaccttgaggtcctccgataacaaagcgtccagttggattaatgaagaatttcgtcttatcatcaaggtatttttctggaataaccgctttgataactttttcaattacatcttgacgaatttggtcatttgtcgcttctgggtcgtgctgtgtagagataacaacagtgtccacacgaactggcttgtcattttcatcatattcaacagttacttgtgatttagcatctggacgaaggtatgaaatctcaccagatttacgcaaatcagccaatttcttcaccaatttatgtgaaagtgaaattggcaatggcattaattcaggtgtttcatcaatggcaaaaccaaacattagcccttggtcacctgcaccaatcaaatcaagcgggtcttgatctgcatttccacgaacctcaagcgcttcgttaaccccttgtgcaatatcaggtgattgttcaaccaatgacggatgaacaccaaccgattcagcagcgaagccatattcagcattagtataaccaatttcggcgatggtatcgcgaacaatacgattaatatcaacataagctgtcgttgaaatttcaccaaaaacatgaactgagccagtatatacggcggtttctgccgcaacgtgcgcatcaggatcttgttccaacacagcatctaaaatagcatctgaaatttggtctgcaatcttatctggatgcccctcagaaactgattcagacgtgaaaagtttacgttctgacataaaaatgtccccccttaaaaattttaaaaattgcttaatacgttatcataaaaagcacttgttaaaaattccatggtttcttccaaaatcaacttaccgttcgagttacgacggtaaaaagcagcattcgataataatgatgctttttgcctagtaagtctcttaggaaaaatcccataggattttccgttgttttatgagtgagtttactcaccataaaacaaagagagttacaaagtaccaatctacatcttctaaaaagagatggcgcggttaatggcgggttagtcaaggcagcgaaatcgcagataatactgaagtatatcaagatgagctaacgaagaataacacgttattaaaccgccagattgtcttatcgggactcattaactcacttattgtaccacgttttaccgcaaatgcctataacaaatttattatcaggtgataacttttacctatctttacaaaggtgatattagttttaccgtgatgacatctttgtcacttcatctagaattcctttataaatttaacaatattgaagctttgttaggaatatttggcaaaaatatattatactaaagatatgaaaacctacgaaaaactttatgattatctcaagacacaagacgattatgttagcggggaaaaattggcgcaagaatttgagctatctcgcacagctatttggaaagcgattaaaaccttggaagacaagggtgttcaaattcattcggttaaaaaacgcggttataaaattatctcaggcgacctactactccctcagcaaattgcgacaaatcttaatattgcggtcactttgaatgaaaaaagtgaatcaactcagttagatgctaaaaataatatcgatactgataaacaaccgcacctttacctagctccaagtcaagaaatggctaaaggacgatttggcagacgcttttttgcctcaaaacaaggtggcatctatatgtctcttcacctaaaaccaaacgttcctttcgaacaagttaaaccctatacgctcatggtggcatctagcattgtcaaggctatttctcgtttgacaggtattgaaaccgaaataaaatgggtcaacgatatctacctaaatggcaaaaaaatcgcaggcattttaaccgaagcgatttcatctgttgaaaccggcttgattaccgatgtgattattggtgtcggacttaactttcatatcacagattttccagacgatattgcacaaaaagctggaaccctttttagcgagcaaccaactatcacacgcaatcaattaatcactgaaatttggaatcttttcttcacaattcctcaaaaagatttagtaaaagtttataaagaaaaatcacttgttttaaacaaacaagtgacctttatcgaaaatgatattctcttttcaggtgtagctgaagaaattacagaccatggacatcttcttgttaaacttgacaatggtcaagaaaaattattacgtagtggtgaaatcagtctttcttcttggtagttgatgtcaacgtgtgaatgaatttgtcaaccttataggtacgcttgaggtcgcgaaaaagcaaaattccccaaaagaaagcaaataaataatcaccttcaaataaacattcattaaaaaagtatgtttcaaaagcgcacatcagcgccacaaatataaaacggcttttagtcatgtttctattataacataccttcattattttgacagatttcacagaatctgttgtttagaaaaagtcttttttgatacttcccttaggttccttgcttttttatttctaggctcagacctcaaagcatctactggatgctcaaaacttccgagatgtaggagaaacttcggttcccttatctgcaaccttaaataatctcccagattgtttaagcagcacaaagtattgtcttgttgctcacttcgttcgcgaataatcctaaaatcgaacagagaaacaacaattgtttgcaacttagtttgagttaaaagtaagtttatctacataaaaaaagaacttcgtttgaagttctttttaatcctcaatcttattaattttatctgctaggaaatcaaagccttctggaatgaaattttcttcttgcacttcttcctgtgctggctctttgcgttgttttttcaaattttgagcaaattctgttcggatactgttgaagtctttacgtggaacagccaaaatatttggtgaaaaacctgctgccttgctcatgatgttgccaaacatatcgttaaggtcagttcgtttcatggcttgttccgcattaaaagctgcatcaaaagctaaaatagcattttcactattggcaagaactggctccgaacctagcaaaagcgcgcggtcttgagcagaaatactgtccaaaatctcattccacgctcctttaagagcctctagatattcccttgatttctgactatcaacaatcgtttcttccatgatggtcaaaatcttcacgcggtccactttaaacttaaagccagtaactgattttttgcggcttaccgttttttgagaaatagctgagctatcaatcttagaaaattcttctttcaagtctttgatttcattcttgagctttgctaattcatctgacaatccgtctggaacttgtgctgtcgaaatttcttttcctgcttctgataattgaatcgttaacatttcagcataaatttttggctgaacaccatttttgatttcaggcaaagctttcgtcaccaaatcaatcattataaaaatacgattttgttcagcagttgctaaattctcttggaatgtttggcttgtatgtgtattttcaccaccagtttgaacgaccaataaatcacgtaagtaatttaacaaatccgtcgcaaagcgactcatgctctttccgctatcaaaaatcgtttccaaatttgccaaagcttgactggtttgatttgccaaaacatttgccacaaaatcatctaaggctgtcattgaaatgctacctgtgatttcttctgcgatagcaagcgacacatgattatcaggcgttaaactaagcgcttggtcaagaatcgaaagcgcatcacgcattccaccctcagcacaacgcgcaatcaaggtcaaggcatcttcttcatagctaatttcttctttatcaagaatattagccaaatgttcacgaatagccgctaatttaatcgctttaaattcaaatcgttgcacacgtgataaaatcgttgctggaattttatgcaattctgttgttgctaaaatgaaaacaacattttctgttggttcttccaacgttttcaaaagagcattaaaggcacctgtcgatagcatatgcacttcatcaatgatgtaaactttataagttgcacggcttggtgcataggttgatttatcacgaatttcacgaatttcatcaacaccattatttgatgcagcatcgatttcaatgacatcttcaaggctgccatttgtaatatcacgacaaatatcgcaatgattacatggctcgccattgacttgattagggcagttcatcgccttagcaaaaattttagcagcacttgttttccctgttccacgaggaccagaaaatagataagcatggctaatttttcctgaagaaactgcttgttttaaagttgttgaaatgaccgtttgcccaaccatttcatcaaaagtttggctacgatattttcgataaagtgcttgatacattatttttcaactccaaacatatccaaattccaatatgatttttccaaaagtacggcaacaaatttttcaagatactcttggtcaatcgcatcataatcatccgttaaacgtgagtccaaatccaaaacccccactaattggttatttttaaccatagggacaacgatttcactcatggctgctgaatcacaagaaatataattagcatgttttgtcacatctgccacaattatcgtttcttgattagctgctgcttcgccacaaacaccttttccaagtgcaatatgaacgcacgataccccaccttgaaaaggacctaaaagcaattcctgaccgtcaaataaataaaagcctgtaaaaatagaatttggtaaagtcatctttaagagagcgctagcatttgaaagatttgatagcagatttttttcgttagcaaatagcgctttcgcctgtgctaacatgatttgataattctctattttctttgtgttttccataaagtttattatatcaaaaaataagcctgccgtcatattttgcttagagtaaacaaacaccacaaaaaagtctgaaataatcatatttcagactttttctatattttattgaatgactacaactgttattttgcctactactttttttaaattattgccaataacttggacgatttttttcgtaggctgctatcaaattttcatattgaagcgtgatgccaatatcatcaagtccaaggacaagtttacgcttccattcgccatcaatttcaaacggaaattctcccgcagatgacttgatgacttgctttggtaaatcaatcgtaatttcttcaccagctggtagcgcagctaatttctgacggacttccaaaggttgaacaattggaagcatcccatttttcaattcattattgtagtgaatatcagaaaatgagcctgcaatcacacaacgaaaaccataatcttccaaagcccaagcagcgtgttcacgtgatgaccctgaaccaaagttatcccctgaaatcagaatcgttgcatcgcgatattcaggtttgttaaagataaaatctggattttcatcgtaattatcattgagatagcgccactcaaacagcaaatttttaccaaaaccttttttatcaacagctttcaagaactgttttggaataagctggtcagtatcaatattatcattcatcaaagggacagacttccctgtgtaaacagtaaatttttccattatctctctcctttactgaacttctgacagttggcgaacatcgatgaatttaccagcaatcgctgccgctgccgccatagctgggctacaaagatgtgtacgcgctccaaaaccttgacgcccttcaaagttacgattacttgttgaggcacaatgaacgccttctggcacatggtctgggttcattccaagacacattgaacaaccaggctcacgccattcaaaaccagcatccatgaaaattttatcaagccctagtcgctctgcttctttcttaacaggacgagaaccaggaacaacaatagctgtcagattcggtgaaatatgtttgcccttgacaatcttagctgctaattcaaggtctgatagacgcgcattggtacaagaaccaatgaaaacgtaacccaaatcaatatcttcagctttatcaccaggcttaatgtccatataatgataagcacgttcatcattcatgtctttgatttctgggaacggtttgccaaattcaacacccatttcagggtttgttccccaagtcaccattggtgccaatcctgaaacatcaatggtaataactttatcatattcggcatcagggtcagaaaccaatgttttccaatcttcgaccgcttgctcgaatttatcacctttaggcgccgcttcacgacctttaacgtaatcaaaggtcttttggtctggattcatcaagcccatttttgctccaaattcaatcgacatgtttgcaatggtcatgcgttcatccattgaaagagcatcaatggcttcaccacaatactcaaccgcatagcctacaccagcatcaacaccatattgagcaatcaaagcaaggataaagtcttttgaataaacacctttttgtggtttaccgacaaattcaactttcattttctttggttttacttgccaaatgcactgtgttgcaaaaacgtgctccacttcagatgttccaataccaaaggcaattgccccaaaagcaccgtgagttgccgtatggctgtccccgcagacaacaaatttaccaggttgactacgtcctgtttctggacctaccatatgaacaatcccttggcgttctgttccatgtgttgccgcatcaataccaaagtccttaacatttcgagcaagggtatcaatttgattttttgacaccaagtcgcgaatattgaaaatatctaccgttggaacattgtggtcagtcgttccaaatgttaaatctgggcgacgtactttacgacctgcatctctaagtccttggaatgcctgcggacttgttacttcatgaatatagtgctggtcaacatacataagctgtggttcgccttcttcaccagtaaccacatggcgttcccaaagcttatcaaaaatcgattttccgctcatttcatcctccaaattcttctcactattcattttctagttagctactatttccaaatgacgatataccagtataaaaccgcaatatcaatcaccattcccaaataccaacaagctttaaagtaccatttcaaagttttatgatgaaagatttttccaccaagaaaagcaccgattccaccaaataagatactttctaaaagcaatgttttctctggaattcgccaacgtccatgctctgctttctttttatcaataccataagtcagaaaggtcaaaacattccacaaaacgaaaatgagaagcgctaattcttttaaagtcatagatttgcaataatagctgcggtcatttcagctgttgaagctttaccgcctaaatcacgtgttaaaatgccttgattgaatgtcttatcaaccgcattttcaatgagttctgcaccagctacttcaccaaaactttcacgcaacatcatggcaacagataaaatcatgctgacaggattggcaatgccttgtccagcaatatctggagctgaaccgtgaatcggctcataaaggcttggtccattttctgaatggctagctgatggcataacaccaagtgtgcctggaagcacgcttgattcatcagacaaaatatcaccaaaaagattttccgtaaccacaacgtcaaaacgtgatggatttataatcataatcatggctgcgctatccaccaattgatgttccaacgtgacatctggaaattctaaggctacttcttcagcaactttacgccataattttgaagtcgccaagacattttgtttatcaatgcttgtcacttttttgccgcgaagtcgtgccaattcaaatgccttgcgaataatacggcggatttcctgcgctgaatagtcattgatatcacgtgctgattcatcttgtaattgatgttcaccaaaatagataccacctgttaactcacggacaacaacaaagtcaactccttcaatacgttcaggtttcaaaggcgacaagtgtttcaacgcatcaaagatacgaacaggtctgatatttgcaaacaaatttaattccttacgaatggcaagcaagccttgttctggacgaacaggagcattatcgtatttcggaccaccaatggcagctaataaaatcgcatcagctgattttgccgcatccaaagtttcttttggtagtggatgaccactggcatcaattcctgcgccaccaaaaggttttgcatcaatgtcataatcaaaattaatttttgaagccacagcttcaaggacttctaagcctgctgccataatttctggaccaataccatcaccagcaagtgtaacaatttttttcgtcataatgagataccgcaagcaacatcgttgcttctctataaattcctttcttacttaattagttggcacatcacggaatgaaacggctttgccaatttcaccagcattttctttttgaacaaaagcattcgcattgacataagcaatagcacctgctttaagcacgtcaaaatcaataccagatgcgttgaaaattgttcctgtatcaacattttcaattgaaacagacacacgcgcttgtgaatcaataccgtctgttacagcatccattgtgtagctgagaaggcggacagtttgattgaagaatttatcgacagcgttatagatagcttcaacagaaccttttccatttgcgataacttcaacttcttcaccgtcagcgtttaccataagtacttcagctgtcaccgtatcatcagcatttgatgttaatttcaaatcgccaaagtggaagccttctggattttcaatttctgttccagcaaccaaagctctgatatcagcgtctgtaatttcatgtttcttatcagccaattttttaaatttaccaaatagcgttgcaatttctgattcttcgaaagcaagttcgagctctttcaatttttcaacgaaagcatgacgacctgaaagtttaccaagcggaagcgagttgtgtttgacaccgacaagctctggcgtgataatttcataagtgagtggatttttaagcacaccatcttggtgaataccagattcgtgtgagaaggcatttccaccaaccacagctttgttcttaggaattgaaattcctgagaagcgtgaaatcaattcagacgtattgaccgtttcgttaaggacaatatcagatgtcgcttgataataatcttcacggatattaagagctactgcaatctcttcaagtgccacgtttccagcacgttcaccaataccattgactgtcccttcaacgcgtccagcaccatttttgatagctgctaaagtgttggctgtcgccattccaaggtcatcatgacaatgtggactgaagataatctcgcggtctgattttgtattttcaatcaaatatttgaagatgttaccatattcctctggcgttgtgaaaccaaccgtatcaggaatattgatgtaagttgcgccagcatcaaccgctgtctgaacaacttggagaagataatcaagttctgtacgggttgcatcttctggagaaaattcgaccacatcaaatttactgcgtgcataagtcacatgttctttgataatatcaagaatttcttcttttgtttttttcaatttatattcacgatgaataggacttgttgcaatgaacacgtgacattgtgggtatttagcatctttcaatgcttcataacaagcatcaatatctgatttcacagaacgtgctaaacctgacaccgcagttgttgtcattgctgctgaaatttgacgaaccgcttcaaatgaatcaggactagctgctggaaaaccagcttcaattgaagcaataccccatttttcaagctgtttggcaattgctactttttctttgattgaaaaattaacgcctggcgtttgttcaccatcacgaagagtggtatcaagaaattcaactttacgcatagtaacctctttctaatattaacaaaagcattaatataaaaataaaaacatctcacggacaagcgagatgttctttatcccgcttggtaagccaaacaggactaatgctttcatgcactagccctcattacgcaatagcaagactgtcatatttgcgaatgtcattgacttaattcccttcgatgtttttcgtttttttacataatactcttttctagaataaaagtcaacagaataatccaaataaaataaattttctgaatactttccgagatttttacaaaatagttgataacttagctgaaaaagagacttttttctgttgatttgttataaaaactagcaaacttattgttggtagtttgctagtttactgcttatgctggtttgattttaccagttttttcaattattttgaatttcttattttaccgctcctgctgtcataccacttaccatatttttaacaagtaaaaaataaagtattacaattggaactgctataaagacacttcctgctgcaaagcgagcaaattcagtttcatccaaattcattaacccaacagcgaccgtataaagatttttttcttttaacaataatttaggtagaataaaatcactccaaggccaagcaaagtttgttaaagctgtatatgtaataattggtctagatagtggtaaatgaatatgccaaaaaatttgaaaacttgtcgcaccatctatccttgccgcttcatcaatgctatgaggtatggtgtcaaagaatcctttttgtgtcaagtaccccattggcgctgcagcactataaattaaaatcaatccccatagtcggtttatcaagttaaattgagtcattaataaataaaccgcaatcattcccataaaggaaggaaacatcccaagaaccatagttgttttcatcaatgtcttcttccctttaaattggaatctagacattgcataagctgttaaaatgaccaatagtgttcccaaaatacaacttgctgttgcaataaaaagggtgttcataaaccacttaggatagttatataaatcagtgtctgtaaacaaggttataaaactatttaaactataagattttggaaagaaaccttcaaaagaatagatcgtacctgattttgaaaaagaggctaatatcaaccataaacatggaaacagaaatataaaactcaccaaaagaagcgcgagataaattcctgatgtttgaaaaatattcgaccattttttcatgagatatttcctccctctttatatgatgatgaacgaacataaactgatagtgaaacaattgatgttaacaagaaaataatcaaactaatactagctccaatactatagtaattattatcaatagaaaggttgtatagccaattaatcagcaaatctgtatcactcgctaagaaataattatccaaatacagaccaccccttaggaagtaaaaaataccaaaattgttaaaattccctacaaattgaccaataagaacaggagtggttgctgtaatgatatatggtaaagtaatttttgtaaattgcgcccacttatttgctccgtcaatttctgcagcttcataaagtgattcatctcgattagataataacccagttgctaaaagcataatagacggtacgccaatccaagcatttactaaaagaccaataacacgcgctgaccatttagcatcaacatcaagaaagcctatggcttgatgtccccaactttgtatgatttggttgattggcccaccataagagaacataaatttaaaagctagtaaactgataaaacctggtattgcgtaagctaaaattggaaaagctctccagattgcatttcctttaacacgcttatttgtgaaaagcaatgccaatgctaaaccaccaaaataattcagtcctgtggataaaattgcccatacaatattccaactgagtattttgaaaaaagtcggggcaaattgagaaagagaaataattttaacaaaattattcagtccaacccaacttactaattcagggggaactatctttccaccgtaattagtgaatgcaattaaaatcatgaaaataataggtagaacactaaaaaccataattcccaaaactggtacagacaatacgaaaaacggaaaatctctgtccataataattgcaatttcttctcggaaagttggtattttcttcccctcacgcctaagttgctcaagatgtaaggcgtctcttacattgaggtagtataggtataaagcaagtgctaataaaataaaactcaaaatccccatgagtaacatgataacggaattatcaccctctataccaaaccaagtatcagctttttgagtaccaagagtgaagaaaccaaccatatcttgaaaacctcttaagaaaaaataactcaaaaatgctaattctattccaaaaaataatatccctttaactttttgtccataaaggaattgaccaaatcccatacaaaatatggatgtcctagcttcaacagatgtttcccttaaagcttttattcctcgcttaaacatatcttttctcctattctaatgtgtgaatagcatcgctaatctgttgtgtcactttctctagcccttgtttaagatcttcattcgttttatattttttatcagattcagagcgaaaaacatcctttgtgatatcagcaaaaaaagtttgtgttggtgtccaaatttgtgaaactgctgaatttgacggcataagaacaatattgtcgttttcaagattttcgtatacagcctctgttactccaccaatttcttttaccacatcttctctcgtaggtactatacccaacatctcatagcgcttaacaatattttcataactagtagcaaaattaataaaagcaagacttgcattcggataattcgtataagcgcttatagcgtaaccattaacaccacccatcgttttggtatcaatcaattctgaagaattatctgttaaatcaccgctttctggcaattgtggcagactaaccattacaagattttcactagctaactcttttgcctcttcctcagattttccttcgttttcataagtttttattaactcatctaaaaacgttgagtaaacatcaggagttgacatagttgcaaaataggttccatctgctagtttactgtatgcactagtcgtaatcgtatcgtcaatactttcttcattcatagcagaagccagttgttgaataattttagctcctttttcagcatcaccagccgcaaaacctatatcgttagtatctgtattatcatcaccgaagatataagctccataagaaaagagaaaaccacttgagaaataagaatcataaagtgattccatgtaaccatattgggaagaattctcagcatgacgttcctgtgaaaattctagtaaactagaccaagtttcaatcatatcaggaatatcattgttattatcatcccaattttcctgccaatcgcttggtaacaaatccttccgatagtagagcataggcgtttgaacattaacgggtacaccacaagtataagttgtaccatctttctcaacttcaaaggctttccatgctgccgaagaagttgtatcataagcatctagctcttccacaggtaatgggtatatatgctgatcttctgcatattgcatgataacatcattagcttggtataaaacatcaggtccatagccgtacggtccatcattagccaaatcaacatattggtctgtattagcatctactgccgttatattgtaatctgaatacgcttcattaaaggccgcaattaactcagcaaagtaatccttagaaatcgctgtatcattttcaagaactttaataacagctccttcttctaattcaccgttaaaaatactactctcaccagtagaattagtctgacttgaaggaaaaggatgacaaaaatttgctagaattaaacttggaatcaccgtcagagaaatagcgcttaaagtttttatcttcattatcttctcctatgtttcataaaagacataaccgtatggtaataaaaatccatttccttgcaatcctttatccagtaaggtaaattctggtaaaatgactgcttgtttttcagttcctaaattaacttgaaaagtcaaaacattctgtttccacttacgtttgatgataagtaagtcagccttactcgagatagaaacatcaccattttggatacattcattctttttcatagaaataattgctttaatatgatttaaaaattccttatcccaacttttttcttcccaattgaaagttcgacgcgaatctggatcataaccgccttcaagaccaatttccgttccataatagagacaaggaacccctggaaaagcaaacattagagcaatagcagctagtaatttatcttttgattttccaacttgtgttaaaatacgatgagtgtcgtgagaatcaagtaaatttagattcatttgattgacttgtctcttatttctcatcaaaatttggttcaattgatgagataaatcaagcgcattgaagttgtcaaaagcaaaataatctaaacaggctttagtaaaagcgtaattcataatgctatcatactgatcccccattaggtaagggtaagcatcatgccaattttcaccaatcaatacacaatctgatttctcagctttgattgcttttctaaattgacgccaaaaatcatgagaaacttcatctgatacatctaatcgccaaccatcaatatttgcttctctaatccaatataagccgacattaatcaaaaattcctgaacttttggattagaagtattccattttggcatatagttgcaagaagcaaaacattcataattaacgctttcaggatctggataatcgccattaatcaaaaaccaatcatagtagggagaattgacacctttggtcataacatctgaaaattcctttgactccatactacaatgattaaacaccgcatctaaaataacacgcatacctttttgatgagctttttcaaccaactcttttagatctcctaaagagccaaaatgttcatcaatcaaatagtaattaataatgtcatatttatgatttgaaggggacttaaagattggtgttagataaattgctgtgattcccaaattagagagataatcaagatgattaataatacctcttaagtcacctcctgcaaaatttttaggagttggtttctctccccatttcatatcaatataatcctgatttttatcaaaatctccttgcgaaaaacgatctacaaaaatttgataaaaaacactctctttcatccaatcaacagttggaaaaatatctacctcattaatgtatggcatttgaaagaaattataaaaaccattatcaaaatcatatgtttttgttagaccatcttcactgaaatagtactgttgattatcattatccaatttaaaaatataagccaatcgagtgtcttctagttttaattttatttcaaaatagacaaaggtcttatcttcaaattttagtggcatttccactttactacgttcaaaatgataattgtattttttcccataaagaagataaacacgtgtcttcttatcttcttttgccattctaagtctaatgaccaactcatgattacttaatgcaaaacaatatcgtgaatctggaatatgtaaaattcctgcttcattcatttcatactctcctatgctaattataatttgactttttaatcatttttttatataacaaatctatgaaaaagattactatgaaagatgtcgctcgtgaagctggggtatctgtggctaccgtatcatacattatcaataatcgtgaagatcaaaaaattagccctgaaactcgaaataaagttctacaaattatcaatcttctcaactatacccccaatcaaacagcaaaatcactcgtcactcaaaagtcatatattgtcgctttatactataaagaggcaacttcctatttaaagaaagctgaacaacttcattttattaataaattgtcaaactttcttcacgataaaaactatcatttaatgtgtctgagtgagccacatattgaaaagtttgatttagctgatgttatattgactttagacatcaataaggaggatttctacagaattggtaacgccaatttcgctcctttgattgcgcttgatagtttcgtcaatgacccactcttctttcaaattaattctgactttcaaaaattgaaagaactggcaaatacttacttcaaaggacagaattttacttttatgagcttaccgattgaagattgtgaaagaagagaacttttaaaagaagtttttccttctctagtttttattgagacagtagacgatcttacccaaaataaccataaaaatatattagttatagattcaattttaaataatttaatttcatcttctgaagccaaattgtatattcctaatttttctgaagaaaaatttgacaaggtctttcaagcaattgaatgggcttcacaacgtacagaaattagtaatcataacattcttgtatagagactaggataaatcctagtctctatatttttactcttcaaaggtccatgtaattgtatcaaaattattaatattgaaagactccttgttttcatcagtatactcagaactttcagtatcatatatatcctcagctggatgagttgttaaggtaaatgtataagttccagctttagccactttaatattagagcgcttacttgacgtttctcctagaccgcctgaattttcaaaataggttacaccatcaatactagtagcttctagatagccaaatcctctttggtcttcccaactgctattaatggcaaattggaattcatctccttcttctaatgtcaatgtgatagtgtaaagattactgtcatcgctatcttctttagtcaatttatgttcatcattaacagttgctccccaattagatgcctttagaacatcactatctccatttccaactacaataaattgacgtgtatcttcttcataagttgagaatcctgcataaagtgataaattacttgttagttcactactatcagtaaattttcgtgaataatctggcttgataaaccaaccaacaaaagtttttccatccttagttggtgtatattctaaaacttcttcggtcgtttttacctttgctgtttttaaaaccgtttcaccatcactgtcataataagttaccttattagacgaaacttctgatgtactcgttccagaagaactactagtttgtgaattttgactacaagcagttaaagtaaaagaaagtgctgcaattgttaaaatgtaaaaaccttttttcatgataatacctcacaaaatatgaatgactccaacttaaacgtttaagttaattttattttattgcaatcgttttcaaatgtcaagtcgttttcgtataaaattataaaaaaactaccaaacgtattgttggtagtttttcgtctattcactacaaatcattctaaaatagttgcgattttagtgttgataaggtcgatagcgacaacgtttgatgctccttctgggatgataatgtctgcataacgttttgttggttcgatgaattggtggtacattggcttaacaactgatgtgtattggtcaataacgctgtcaaggctacgaccacgttcttccatatcacgtttgatacggcgaataatacggatatcgtcatcggtatcaacaaataatttaatatccattaaatcacgaaggcgtttatcttcaagaaccaagattccttcgacaataaaaacatcttgtggttcttggcgatatgttttttcgctacgcgtatgttgtgtgtaatcataaattggaatgtcaacaggacgccctgcaatgagttcgttgatgtgttcaatcatcaaatccgtatcaaaagcaagtgggtggtcataattggttgacacgcgttcttcaaatgtcagatgactttggtctttatagtaagaatcatgttgaatcatcgcaatcttttggtctttaaaattcgccaaaatagcctttgaaacactggtttttccaccaccagagccaccagtcacaccaataataataggttttttacgcatttgttactccaaatcaaaaatatttcctatctattctactacatttttaccattttttaaatgctgaaaactcttacttattcacgaaataaaaaaagattccctttctatgttataataggtgaagattacaaacatagaaaaggaaacttatgatttcacaatttccacaagtctggcaagagcagttagctaatctgaaatttagcgagctaacagctattcaaaaacaaattttcgagcctatttcacaaggtgataatgtccttggtgtcagcccaactggtacaggtaagacactagcttatcttttcccaacacttttaaatgtgacacccaaaaaatcacaacaattattgattttagcaccaaataccgaactagcagggcaaatttttgaggtaactaaaacatgggctgagcctctaaatcttacagcacagctattcatttctggttctagtcaaaaacgtcaaatcgaacgtttgaaaaaaggtccagaaattcttatcggaacacctgggcgtgttttcgagttagtcaagctcaaaaaaatcaaaatgatgaacgttgacacaatcgttttggatgaatttgatgaattgctaggtgactctcaatatcattttgttgaaaatatcatcaaccgtgttccacgtgaccaccaaatggtttacatgagtgcaaccaataaagttgacgctgacgcactcgctgaaaatacgttgacgattgatttgtctgaccaaaagctggaacaaatcgctcattattacattaccgttgataaacgtgaccgccttgaattactccgcaaattttcaaatattccagaatttcgtggcttggtctttttcaacagtctttcagatttaggagctgctgaagaacgtctccaatttaatcgtgtttctgctgtttctttggcgtctgatattaatgtcaaattccgtaaagtcattcttgaaaaattcaaaaatcatgacatttcactactgttggcaactgatttagttgcccgtgggattgatattgaaaatctcgaatacgttatcaatttcgaccttgctcgtgataaagaagtctatactcatcgtgcaggaagaactgggcgtatgggaaaagctggcgttgtcattactttcattacgcacaaagaagaattgaaaaaactaaaaaaatacgctcaagtctcagaagtttatcttaaaaatcaaggacttcatttgaaaaaataagccttcaatacactcaaaaagcacacccgattgagaattttctctttcagatgtgctttttttgttagaggaagggatgactaaacttaaatttattagtctttagagacttttcttcgtttccagatgcctgctgttagtgtcactaaagtaaagccgagagcaagaagataattttgtgtaacgcttgatgtttgagggagctcgtcggttgcttttgaacttgccaaaggtttagcaggagttgaagctttaacttctttatgaacggttacgacccctagggcagctacctctcctcctttctcgttttcactgacctgcggttccactttcggtggtgtttctggtttgatgacctcttcaggaatgagagattcttctttcggaacatcagtgtcctcgataatttcttgaccgtctagagctttttcagctgctttcaaattagccaaggctgcatctacttctgcttgagttgcaccttcatttgctaaaacagcaagtgcttcttcaagggcttggtcgtaagcgtctttgacagtttcgctggcattttggtatttagcggctgtcactttaaggactgcagatttagctgacaaatcacgcaaagctgtaaagtctgttgcttgtccgtccaaagcttcacgcgcagcaaccaaatcagccaaggctgtatcgacttcttcttgagttgtttgagcttttgccaagataaatttagcagaacgataaagtgtatcataagtaatgcgtgatgacgcactagcattataataagcagggtctgcttgaacaccagcataacggtcgctttcatcactcaaggcttggtattgtgtttcttgaccatcaagagctgctttcgccacttgcaagttagccaaggctgcatctacttctgcttgtgtatgtttttccgacaagattgtttgagcacttgttagcgcatcacgataagtcaacaatttagctaatgatgcgttataataacgtgcttctttctctaaatcagctgttgcatttgtttctgaaatcaagcctgtcttatcaattacactgaatttcacacgattttgtttgccataaagaactataaaatcagggtcctcataaatttcatagccctctggtaaattcaatgccaatgtgtaatcgccaacgtaaacatctttaccataatccgtttttacataacgggctgctggaacactagttacttttccgtctttattaacgattgtaacgtcagttcccttaggcaaatctttatcgaaatcaagcaccaatgctgctttgctgaaagtgtgaacaaagaaatcaacggtcttataactatcagtctctgaaatacttactttttgactagttggaccagcaagctctgcccactcttcatcataaagcgcaagttcaacagtataatcgccaaaaggtaaatcaaccgttgtcaaatcttcaccaaagaaatgcaaatcagtaacaatatcgcctttagcgtctttgataatgaaagtataatcgacataactattgccttttgtttcatcattcaacaggttaacagtcacacgaccgctatcattaccaacgttaatcaaatcttctacttttgcataagcgacatttcctgcgtaatcctcaacagcatagtagaaatcttcaatgtcagccaagtcaagtggcaatgtgaatgaaccgtcggcatttggtgcgagataaacttcgtttacattatcattttcatctaccacataataatacacactatctttaaagacgcccgaaccatctgggtcaagagccttacgtggcgtaaaggtcaatgtattttcatcataagtcgccgttgtgataatcggttctttacggtcaataatcacatcaaaggctaaatgctgtgcatctgcgccgataacttctggatagtaagtcaaaacatatttatacttaccgtcagctaggtcatgaccgtcttggtctttaccatcccactgcgtcgcatataatacactagcttttttataataatttttaatgcctgacgaatcgccactttcccacaatggattttcaaaattaacatcatccgccgcataaacagctgctgtcgcatttgtataatttctcaagaaaacacctttaaacaagacataatcttgattaccatcgccgtctggtgaaattgctaagtacggttgatcattttcatctaattgtaggacaaaatcaccatcatcattagaataagtaccaagcactttataataaccacttccagcattatttgtcagaagcgaagtcgttgcatcaccactttcaacgacatggtcatcactaacttcaaagtagaaaccgtctttaccgtcagataccagttgataaacaggtgtttcaacaacagctagattttggaaatcacctctgaaaccaacatatggaatgctgacaacttctgctagatcagttgggtctaagaagcgaacaaagccttcaaggtaataaccatttggcatttctttgctcaataattccgcaaattgactagcatccacagtaatcgtgattgtctctgagctattagctttaacagtaatcgtatgacctgttgtcgttgacaattgacgtggtgctagcgtaatttccccattttcaaccgtatccgtacctagattagtttcgtaagttaaggttttatcttggtcaccaatattatgaatagttacatcaaatgtaaaggtatcgccaacatttccgagcgtaacactaccataaccatcatcaccagtcacataaagtcctgtgctaactgctgatgccgtatcaacaagccctgcaccttgttgacgtggtgacgtgtaagcttgtgcttctttatcataatgtgccttagctgtactcataatcaaggctttgacaaggtaaccaacttcttcatctgatttttcggggaaattttctttaaggtattgtttcaccaaagcaactacacctgcaacatgaggtgatgccatacttgtaccactcatcgaaccgtatttatcattattgtaagatgaataaatactgccacctggggcagcaacgtcaggttttagcgcaccatccgtcgtcaatccccagctactaaagctagaaaatttacctgctcctggattgtcaaatttttcagcaacatcgctaaatttaatttgatagccaccttttgctagctcgataccaaatttatatgggataaatgctgacggaatcgcaatcgctgtatcatcaattgccatgctaacatttgaaccatctgggtcgttgttaaagatgataacaccttcggcaccatgtgctgtcgcattcgcaattttttcagaaaatgttaaaccaccacgttggataagagcaagttttcctgttaaatcgacaccttcaagttcctctgctgtccctgttccaacatagacataatcataagctttgccattttcaaatttcttatcacttttatctggattggtaaatgaactcttaccattgttaagctcagcattatcttccattccaacaaatgtcactacattgctacgtgtaatgctattgttgtaagaagcaacagagataacatcttgtgttgttgatggattgccaacaagaccataatcaggattttctgctgacggattaatactgtccccaaaagcaccttcattaccagcagcgaaaacgacgttaacaccagccttttgagctgcctttacagcgtcaattaatgtttgttcaatattaacttcagagcctgttgtacttccaagactaaggttgatagagtccgcacccaatttcacagcgtcttcaattgcacgaacgtaaagtgctggaccagtcgatgatttcaaatctgagaaaacacgtaagaaaatgacttgagcttctggtgccacaccataaatgtattcatcacccaaagctttggtaggatttcctgttgcaatccccgtaacgtgcataccgtgtgaagcttcttcaccttcttttaaaatcgtatttccatcaacatagttgtatccaaagacaactttatcattaaaccatttcccataggtaataccagctgcggctttagctgcttcaatttcttcttcgctaccatatttagcggtagaaaggtctgaaatgtgtaaaacatcatggtcaacatccaaacctgaatcgataatagcaacgattgttccttgtcctttatagccgctctcccaagcctctggaactgtaataagctcgtcactatcaatactttgaggtgttgcagaatcaagtgtttgctcttctggttgagctttttctgttacttcagtaaccacttcactagaaacacttgctgcagatgcttcaacatcttgtgctatttcttcagcaacttcactcgaagcactactctcttgcgcattagccacattaccaacagcagtcgcttctgatgtagcagctgggatagaaagttcttctgatactgtctcctgcgttttagaagctaatgccacttcatctgctgttgcactagctgtcgccgtgctttcaaccctacttgcttcaatcgtcgtttctactgatgccacttgagcaaaatcagctgtgcttgaactttctgttgcctgcaccacttgctcaatattagaagcagagtctgtttgacttactcctgctgcttttgacaactcatcagccgaaacacgacctgcacctgctgccaaaaagacagctcccacaaggactgaaactagtccgaccttgtacttcctaaaagagaatctctctttcttatccataataaacctcccaaaatggttatttcatattgacggctcgtcaatataaaaaacattaaaacacaagtttattaaaaaatcaatctttttctgaaaattcttttatttttaccatattttatagttataggtatatatataaaacatttatagtcagatttattgacaaataatgtgataaatactagggattaccttatttataattattagtcaaaaattgtatttttattaaaaaacatcaaaaaaagtacccgctagggatactttttcatcgaataaatagtttttgtaagaatatgaccttattttagattgttaatcactcgttccaaacgtgagatagcttcaacaggcagagctagtttagggttattttgattgaaagacaatagaaaattcaaacgaatttgcatccgtgaacgaatcaattgtttgtatttcgcatcaaaacggtggacaggatagtcctctaatgtcagatattcaaagccttcaattggaccaaaagccttaaaatcagcattgccgtcaacaattttttcaatgatatctaaagaaacttcttttggaataccatttcccatgtaaaatcccgtattaatgatataacagtcaacaccactagcaaataatgaacggaatttttggtaatcttcgaccaaaggataaaccctaaatggatttgcaaatggttcaataactaatgattgcttgctaccttcaatattttcagcgcttgaacgttttgtcatcaatgtacaacccattgtcgctgccatgagtggatcattaattttgattaaaggtggcaatgaatcgtctttcataatccaaaaaatagcattaattggctcctcgatatggtcaacacgatttggcgttgcaaaacgtgattttacggtacgtccgttcccattacgaatatcctcggtcatcaattttttacgaccattatcatccaacgtcacaccacaattttgaacagtcacgaaaaagtcttgctctgggtgtccagttggataatcgttggtcttatcaaaataagacggttctagcgcaatggatgagccatctttttcggaaataataaaggcatcatcatgtaacactttgatatcgtattttccattatgcttggcatgagtcaacgttgactttcctgaaccagataagccaaagaaagaggcaacataatcatttttttcctcttttccttggaaaattttcaaaccaccgtggcaagaaacatagccattgcgcgcagctgttccccaagccaacgttaatgtcgcttttttcaattctccaaaataattcaaacctaaaatagccacacaattgtgattcgtgtcaaaataagctaaaccatctggataatctggatgagaccatttaggatcaaaaaagacaaaaatatcatcttcatcataccgtttagaaacttttaaacgatttttaaattcttcatctaaaatctgaaaattaagcaaccatgaatagagattgttgatttcttcctcaggcaccatcaaatgtgcacgcaccataaactcttcatccaaaccaacaatagcatctgctttatagaatttgcgactatgggcttgataaaccgcacttcgcacaatggataacaagcgctcatcttcatctgaatccaagccataaatacgacgtgccttagctgttctaccaaccacagctcccgaatttgtcaataaaactcgagcataggacggcaagccaagttccttcgtatgaatgacaggcatgtccaaaatcactgtaccagcagcattcgatgccaattgataagcctcttctaaagtcttaattgaaatgacctgattctcataaaacgctgtttcgacaatagtttttaatgcagaaaaatatggacttgctttgcgcatttccaaagttgaaaattgattacgtgttaccattttctacctcctattgtatggttacccttattttatcacaattgcatacgctttcataaccaaaagtgtaaaaccattgcaaaaaagaaaaaatttataaaaattttcatgaagaacacaatttgtaaccatatttctaaactaaaaaaggtcagaacaggaccgttctaaccttcatcaaaaattattttgcaatatcaaatactgtagatttaacagtagtcattgcttcaatagagtatttcacaccttgtgttccagcaccagatttcttagcaccaaggaatggaaagttatctgtaccacgttgtgttttgttgttaatgtgaacagtacccacttcaagttgttcagcaatcttgaatgccaatgggaagttatttgtaaatactgctgcttgaagaccgtattcagatttgtttgaaatttcaacagcttcttctactgaattaacacggataactggaaggactggaccaaatggttcttcccaagccaaacgcatatcagttgttacattgtcaaacaatactgggctaataaggttaccttcacgtttgaatgaaataacttctttagcacctttgtcttgagcgtctttgataagaccttcaacatagtcagccgcttttgtatcgataagcggagtaatatcagcatcatcttcaggcataccaacagtcaaatctttaacaagttctgaaactttggcaaccaatttatctgcaacgctatccataacaaggacacgtttaacggctgtacaacgttgacctgagtaaccgtaagcacctgcaacgatgtttttagcagccaagtcaaggtccgcatcttcaagaacgatagctgagtctttaccaccaagttcaagcataattggacgcataccagccaatttaccgatgtgttcacctactggtgtagaacctgtgaagttgatgtagttaacagcttcgtgttcaacaatgtagtcaccgattactgaaccacgtcctgtaattgtgttgaatacaccagctggaagtccagcttcagcaaatgcttcagccaaaagaagacctgaaatagaaccttgcgtaggtggtttaagggcaacaacattccctgaaataagggcaggagcaatcttagaacctgcgaggttaattggatagttaaatggtgagatagcaagtaccaatcctactggttcgcgacgaacaatagcgatttttttcttgcttgctgcttcaaagcttccaccttcaaggacttcaccttcaagacggacaccttcttcagcggcataattaatgatttcagctgtacggataacttcacctactgctgatttgtaacctttagcaatttcttttgaaagtacagcaccgattttttcagcatcacgcactaaaatatccgctgctttatgaaggtaagctgcacgttctacgtatgaaagcgcacgccattctttttgagcggcttttgcagaagcgtaaacgtagtcaacttcttcttggctcattgcaggtacagaaccgagttcttcacctgtggcaggagcataaattttaatttcttctttagaaagtttccactctccattgacatagtttttatattgtttagtcaagctatatctccttttaaatgtgataattccattttatcactttttctgcttttttcaatattttaacacgaaaaaattcagaaaattaagacaaaaactttgcaatatcaaattttcataataataaatttattgaataaagttttttatggtaaaatacgaatttcatctgtattgtacaacttagagtacactccaagtcaaggattttgttttaaaaataaattctccagtgaagattctattcataagcctttaaaaatcagtagttctgacaaaagttgatttttcagctattagctaagctaaagtgacaggaaaaccactacacatctatccgtaaaattaaaaaagagttcggacaaaatagtccaaactctttctaataatattaaacacaattaatcgaaatcaacgtattctttgctaagctcaagaacttcttccattgttgagcattctgtaagagcgcgatttgcatattcttgcattttagctgtatcaagtttcttcataaggctacgtgtacgaagaattgatgtagctgacatagagaactcatcaagtcccattccgacaagaagcggaacagctttttggtcaccagccatttcaccacacataccagcccatttgccttcagcgtgtgctgctttgataacattgttaatcaaacgaaggatagatgggttgtatggttggtaaaggtatgaaacttgttcgttcatacgatcagcggccatagtgtattgaataaggtcgtttgtaccaattgagaagaagtcaacttcttttgcaaattggtcagcaagcatagctgctgctgggatttcaatcatgatacctacttggatatcatctgccactgcaacaccttcagctttaaggttagctttttcttcatcaaagattgctttagcagcacggaattctttaagaagcgcaaccattgggaacataatgcgaagttgtccgtgaacagatgcacgaagaagtgcacgaatttgtgtacggaacattgcatttcctgtttctgagatagaaatacgaagtgcacggaatccaaggaatgggttcatttcttttggaaggtcaaagtatggaagttctttatccccaccgatatccatagtacgaaccacaactggtttaccattcatgccttcaagaacagccttgtatgcttcatattgttcatcttcagttgggaaatcttgtgaatccatgtacaagaattcagtacgataaagaccaactgcttctgcaccattagcattaacaccttcaacgtctttaggtgttccgatgttagctgccaattcgaagtgtttaccatcagctgttactgtttcagcatctttaagaagagcccattcagctttttgtttagcgtatgcttcaccagctgctttaaattcagcaatttcttcttctgttgggttgataatcacgtcacctgtgataccatttactgctacgatgtcgccatctttaacacgacttgtgatatcgtttgttccaagaacagccgcaatttcaagagtacgtgccatgatagctgagtgacttgtacgtccaccaatgttagtaacaaaggcttttacaaattgtttgtttaattgagcagtatcagatggtgtcaagtcgtgtgcaataacgattgattcttcatcaatagttgcagggtttggaagtttagcaccgataaggtgtgccaatacacgttttgaaacgtcacggatatccgctgcacgttcttgcatgtatgggttatcttccattccttcaaagatagtgatgaacatgtcagtcacttctttaagacctgcttctgcattcgtttgttttgcacggatagtttctttgatttggctgatcatttctgggtcagcaagaaccatcaagtgtgcatcaaacacggcagctgcttcttcacctagtgtttctactgctttctcacgaataacagaaagctcgtcttgtgatgcttttaatgcggcatctaggcgagcttcttctgcacttgtatcttcaactgtaacagtttcaaatgacaaatccggttgaacgagtagatacgctttagcaacagcaacaccatcagatgcggcaattcctttaagcatttctgtcattttattaagccaatccttctttagtcattgtttcttcgattgctgcaagtgcgtcatcagcgtctgcaccttcagcagagatagtaacgtcagcaccttgaccaacaccaaggctcataacacccatgatagatttaaggtttacagctttacctttgtagtcaagagtgatgtctgaagcaaatttgctagctgtttgaacaagcaaagtagctggacgtgcgtgaattcctgtttctgcaacaatgtgaaaatcttttgaagccatattatggttctcctttttatttgtgttttttcgaattatcatatgataacccttacaagacatgattatagcatattcccgtttttatttcaatacttacacgtttttgtgcgcgctttcttttctgataatttttgattttgcttatttgcaacacctactaaaaaagctgatttagaggtatttttgagcgttttcgtatagaaattaacaaaagtatctatcaaataagcattctaaaataaattctcttttttctgtggtataatgaaaatcagaaaaatgtcatggtaagcgatataaaagttttaattcattttctttgtttttatggaaaatactgaaattcatgcttacttacaaacatcttacacttcttttggattcaagacgatttctgatgaatacctagagaacggtattccgcatattgatatgatattggagaataaacgatgaacaacacttttgaagaaattttagaaaaaataaaagcttacgataccattattatccaccgtcatcaacgtcccgaccctgacgctctcggtagtcaagtcgggcttcgtgatattatcagacataattttccagaaaaaagagtcttggcgactgggaaagacgagccaacacttacttggttgacaaaaatggatactgtctctgatgatgattaccaaggcgctttagttattgttaccgatactgcaaacacgccacgtgttgacgatgaccgctatacaaaaggtgactttctgattaaaatcgaccatcaccctaatgacgatgcttacggtgatttgctttatgttgatacaactgcttctagcgctagcgaaatcatcaccaattttgccctttcaactaatctagctttgtcaaatgaggcagctcgcctgctttattgtggtattgtcggtgatactggacgtttcctttatcctgcaacaacaagcaaaacactctcaattgcgagcaagctacgcgaatatgattttgatttttcaacactagctcgtcaaatggactcgttttcatttaaaattgctaaacttcaaggctacgtttttgacaatcttgaagttgatgaaaatggcgctgctcgtgtggtattgacacaggataccatgaaaaaattcaacgtaactgatgctgaaacatctgccatcgttggaacgcctggaaaaatcgattgtatccaatcatgggcaatttttgtcgaacaagctgataaacattaccgtgtgcgtctccgtagtaaatcacaggttatcaatgaaatcgctaaacgtcatggcggaggcggacacccattagccagcggagcgaattcttatagccttgaagaaaacgacgaaatttaccaagaaatcaaagacttgctagtaccaaagaactaagcaatcccttgatagccttgacttaatgacaacttgattttaattcaattaatttgcttaaaagtcttgtcaaatatcgcattatttgataaactatagaagttaaaataactatggtgcgtcaaaaaagcaccatggcagaaaggaaatcttttaacaatgaaacaaaacatccatccagaataccgtccagtagtgttcatggacacaactactggttacaaattccttagcggttctacaaaatcttctaacgaaactgtagaatttgaaggcgctacttatccacttgtacgtgtggaaatctcatcagattctcacccattctacactggacgccaaaaattcacacaagcagacggtcgtgtggatcgcttcaacaaaaaatacggtctcaaataagaaaccgcattttacgggaaagctgttttcgagcaatcgaaattggctttttttattttcaaaataatgtaaaaaagaggagaaaattcctctttcctattctattgactaataaaacgaagccatgcttcatcttctgctagaatggctgctgttgtgtaagagccacgatattcattccagacatggtctgaattgtcctcgctacttgtttcttcctctgtgcttgctggttcatcatagactgtcaaaccatattgctcaattaaagcatttaatttatcagcataagatgtgtctgtggcatacaaaccagtcaaggctgccgtggcgtcttggtaagatgttgtgttagacttccacgttccagaatacaaatcccaactaagcaaattagcgtaatcattcaacgaatcgcttaaactatcatacgacctaaatgcttggtcaacttcgtaagtattgccatttccgtcatcttcccaagttagcatggtcacagaattgccattgtaactccctttgataccaaagaaattataataaggagactgactaagcgcagactgcccactacttgactctaagacagcttgtgcaatcatcacagaagcgtagaggttacgctcttgcccaatttgtcgtgctgtttcgccaatgcttgcaataaaatcagctgttgctgtatctgatgtttccgaagattctgcgacaaccgcttttgtagaatgttgaaaacaaaggttaacgcccaaggtaatacaagtaaccaaagttgcgcaggttaaaaagaactttgtaatacgcttttctttcacggtgcctccttaatgtaagtgctatcttagttcattataacaaagttttcagaagctggcaacgcactcaaaaatcgtctattgtcacactgataattcaatctgcaagaacttgcaagcttgtttaattgttcatcaaaaaaaccagaacctcggttctggttaacttgtattacaagtttttctttttcttagctaatttggtcattgagatgtcaatatctacaatgtgttcgactaattcatcggttaataaaacgtcatcgtcgtctgaatttaggtcgatttgataggtcaacgtcaaatgttcaccgctatggctacttttcaacgataccaattcaatatctcgacaaaattggtgtaggatgtggcggattaacttttcatcttttcgatcttttggcaaatctatcaccaaatgtctcaccgtttgtcctgaactaaagaaggtcattttttccaaaccaagccaaatcaccaagaaaacaattgtggtcaaaatggctaaagttaggtaacccattcctgtacttaatccgatagtcattgctaaaaagagtgccaacagttcacgcgcaccacctgcagctgaacgaaaacgtaccaaactaaatgttccagctacggcaacacttgttcccagactaccgttcaccaagaaaataatcactgacaataagctaggaaggattgtcaatgtaatgacaaattcttttgtgtaaagtgtccgataacgatacacccacgctaaagcagcacctaatataagactgaccaaaagggataaggcaaccatcaatggatttaccgtcgcactcgcacctgtataaacactattaaataaactcaaaacaataatcatctcctaacttattcaatttaatttagactattccttgtgatttacgataagctgtgccatattttgaaaacgatgttgactcaatgccgtgtttcatcaaaatagcttttagccattccggttggggaccaggggttttaatttccatgatgacttttccgtcaccgactagctcactaccgtaatttcccattgatttttctacatcataatcacggtaagtaacattttggtcaactgtcacacgaattttcgtttgtggttgccctttaatatgatgtttttctttaaaagaagaacgttcataataaatcaacatacgtgcactcaagtcaccatatcgttctttaagtgtattcaattcatcgattaaaagttggtcttcgcttgtggcatgtgtcaatttcccactttcgataaattgtttaatagcgcctgtttccgaaaccaaacggaatttatgaccgataccttcggcgtcttttttctttaattccaaaaaggcttggctatcttctgtcggatttgtgacataagttctcatacgaatcttttcgcgaccatttttctttgcaatcgagtcctgaatgacttgaaaatctgctgtgtcaaaataaatattagtaattgttgatgtcggataatcatcctctacaaggtgttctttcaaatcatcccaaatagctcctagtttttctttatccaaaacatactttttctcaatgcgtttaaaactagtctccaatgctttaaccattttcagcacctcttctttgatatttcccaaatcacttccctttgcttacataacgcttagcattttactgaaacttccttatttttttattaaaataagatattttttcactaacgaagaacaacaaagtggtaacaggtatcatatttcaaacaaaaaatctgaaacgttttgtttcagattttttagctatttttgatgaggttgtttttagtgggcaacaatttcttgtgcgatttcttgacctgttaagctagttggataataagttggccagttatccatttcttcaagaagcgcatcttggctttcgccaccccagaaaatgtggaaatgctcggcatctgttgttgtgatgttgtggtcactaaattggacgtatttgaattcaccagcattttcatcatctgtttcaaacaaataacggacaccacggttacctttttcataagtcaaaatcttgtaacctacatatttataagtaaacttgtatttctcaccgtttttaataaatgtaatggtattctttttaccgctgatattgatttgttcaacatctgtcttgtaacctgttgtgtagtattctttgtactcttcggctgttttttcgccttttgaggctttagctttgtattcccaaacttgatccaatgtgccgtcaagaagatatgggtaaactgattgccatttaccagaccaatcgctcaatgaacggtcggtaacatctttatctttgaagtaaccattttgaacagtcttggttgtgtctgtttcagctttgatagtcttaccagcgacatctgttgtcaattgcaaagctttcaagttttcttccataactgagaaataatcttcaccagctttgatttgtttgcttgttaagctttcaatcggatttaacaccgctgttttgacccctgcttcatctgctaaagttgaagcaactttacttgacgcattttcttcaaagtaaatgtatttaatatcgtattttttgatatattttgtcaaacttgctaaacgttttgctgatggttctgattcggctgacacaccagtgattggaatttgtgtcaaaccgtaatcaagtgctaaataaccaaaagcagcgtgctgtgtgacaaagcttgtttgtttggcatttgacaatgcttctgtgtattcggcatctaaatcatttagtttttcaatgtaagcagctgcattgctattgaaagtatcagctttatcaggatattttgcaacaaaagcgtcacggatattttcaaccaatgtgatagcgcgttttggtgagagccaaacgtgtgggtcatattcgtgagtatgaccgtcatcgctatcttcgtcgtcttcatcagctgttcctgccattaatagcatatctcctgttgatttaacaactgttaaactgtctgaatcaatggatttttcaacgctatcaacccatgtttccatactatcgtccatatagacaaaaacatcagcgtctgaaatcgttgcaatatttttggtagatggttcaaagtcatgtggttcagttcctgctttgatcaacatggttacatctgcggtatctcccgtaacagctttggtaaattcataaacaggatagaaagttgtgacaacatcaatcttatcatctgccgaaacttgcttgatatggctgatttgccaagcaaataaaagtgcaactaaatttatcaataaaagaaatttcttcttcatgacaactccttttcttaactagttaatagtttactggttaagtataacacaatttaagttttttgcaagcttttttctcacaaaaattatttttttcatgcaaaaacaaagaaaccctatgaaatcaatggtttcataggatgtttatgtggggtgagagttcgaggattacttacactttttccagcaataatagataagataaaacgtggcagatagtccaaaaactcgatataccattaataagccaaatcgatctgcaataagccctgctaaaaaatctgctaacataaaacttattgaaatggcaaaattatacaaagaccaagctacggcacgattttccttaatcgtttgattcatttttaacatcaattggttattatagttagcatttaaaattctaatcaataaaaatagtaagattatcagatgaacttctgtttgcatggaaattaatacgactaatattgggataaccaaagtatatttccactcaatttttaaatagcttcctaatgccattcctaaattaaacaaaaacaagataatgcctaaaacatctaaagaaattcccttgtctgtcaataaaaggctagcataagaattatttaccataataagagttgtaaaactaacccctaatatcattaactgccatagtgctaaacgaattcctgacaataatgctgaagcttcctttgaatctgattttacgattttatttggcagcttcaacagacaaatcaagctaatcatcacaaagctaatggataatattaatggatataggacactttgttttagtaaaaatggcgaaataatcgttaccaaagcaataaaaacatactttatcgtatttgaatttttaaggaatttagcatactctttttcattagctaaaacatcaaaattaaaggaaactaatgttcctgaagataatgattcagataagcccatgaatacggctgctagaaaagcaaagactagttttccattcattaacgcccctaaaccaactaataaaaagaggtgcgataatattagtaatcgctgataaccaaatttttgagcacaaatacttagcggtaaatcaaaaactgttccaaacagttctgttactacggataatgtcccaataaccgtataagaaaagccaagttgccttaaaagcaaaagactaacgaaataataaggcaaactcgcactaaaaacattcatcaatagcaaagctcgataccgatttactggcatgctttactccttacctttccctattaatctctcaagatgcttttggtatttttgggcaagttggtcgctagatgctaatgtcaacactttaatggcattttgcatttcaagaatggcttgttcgctctgcgattttttaaactgataaaaatatttgccatagtgaaagaccagtctttcatagagttctgtttcagtcaatgaagcctctgttaattgtttttcaaaataaagcgcatcagataattcatcccgttcaatacacatcaagtagccatttaacaagatatctaatcttaattgacgatttgctggtaggtcttgataaactgctgttcgctggctcaattcttctgacaaacgcataaaggtcttgtgattaaaggcaacgaaggcatttttgaaaagcaataattcgtagcaaccccaattttctacactgaacagatactcactcaagtaagcaagctcgtctgctaagtcatcatcttcttttgacaaatcatgaagataaatcctgattaaaatcgtgttcaagtgttgaaacagctcatttgctgtattgtcagttcgctctgctgctaacaaatattctaaaccagcgatatcttgcactgaatgatagtaatgaattctttctaacaatctctctaaatgattacgctgagaatctcccgcaacgtgcataaactcagcaattggcacattcatttcctctaaaactaaagcaagtcttgttatcgttaaatctgtctttccttgctcaaaacgtgataattgtgatgttgaaatccctgcttcagcaatatctcgcaacgttaatcctcgtgatacgcggtattttttaaataattttcccaaatgtttcattgtcaatctcctttattgaaacttatgctacttttttattgaaaaagtgataattttcagtttttttaatcattcacattctatcacgctatctttattaagtctatacttttaaaaattttaaataaaaaatcccctcttgcttaaagttcaagaggagataatgctattaatcactgactgagaagcggtttgtcatgagattacttgcgtcaaagaggattttgtttaacagtttttgagtttctttttggataaagtcactcatggcttggttttcggcatcaaagtcaatgttttctccgtttgctaaagcggcatcgacacatttgattcgtgcatgtcctgctgccattgttttttcgatataatcttcaatatcaccttcatgttggtggaaatgtgggtcagcaattgctgcaataagacgatttgcccaatagaatgagtctgttgagacattttcgccagtattggcaaaataagctggtgtcgttgaaatttgagtaaagaatggcaccattgttccaaatggcattgaaccgtatgccaaccattgaatccctgtggtatcgtgcggttggtctgggcgcaattgaagaatggctgtttgactagtgcggttgataccaattgtgcggaaggcacgttgtgtgaccgcatttccttctggtccgtacgggtcaaattctgtgtcttggtaatgattgctcaaaacgtatttgacatcttcgatcgtaattttacggtaaggtttttgtgcccatggaataaagaaactacgtgggtcttgttcgatttctgggtttaagaaacgttgcattgcccaagcacgtggtgtattgtaatgacggtctttatcacgttggctaccaaaagcatagcgtgggttaaaatgttcatttgagtaagtcaaatccaagttattgcttgcgatgaaatcacgcaaatcttttgaatacatgtactcatctgggttgttgaactcaaagtgatcaataccgagctgattaggatttgtgacgtaacaatcatctgggacacggcgagcaatccaatggtgaccaccaatggtttccaaccaccaaatttcattaacatcagaaaaggcaacaccgtttgattcgtaagttccatattgttcaaggatagcaccgagacgttctaccccttcacgtgctgtacgaacataaggaagtaccaatgtcaacatatcttcctcaccaataccagattcaaccaaaggatcagctcctagaacacgcgcattggtcgtaatggtttcagtttcgctcatggcaacattggcttcgttgataccagcttcgccccagataccgtctttgcgcaaggcatctggtactgacgtgtagcgcattggattatctggtaaatccatttcaaatgaagacaagactgatttgtaatgacgtggttgatcttctggtttcaccacgataaattgttttggcgtaaaatcgccgctttgtgaatcttccgtacgtgcaataatggttgaaccatcataagatgcttttttacctactaatattgttgtacatgccataatatgcttctccttttactttctataattcatctgcaattttattaattttacgtaatctgtggttaacaccactcttggttaatgtgccttccaaatggtcggcaatttgttgaatggaatagtctggattttcaacacggattttagccacttgttgaagttcaattggcaaggtttcaagtccaaccgtatccatgattttaatgatattattgattgttttcatgctagctgtcacggttttggcaatgtttgccgtctccgcattattagcacgattgacgtcgttgcgtgtctcacgcataatcttaatttcttcaaaaacatctttacattccatagcaccaataaccaaaagaaaatccatgatgtcttctgctttttgcaaataggttaccgcaccatttttatgttcgatgaccttggcatcaaggataaattttcgcatcaaattcgccaaatcttcggcgtggtcttgataaaccgagaaaatttctagctgatattttccagattctgggtcacgaatggttccagtcgccaaaaaagcgccgcgcaaataagcgcgtcccttattatcatcttctaaaatagttgggttaattcccatttcaataccaaagaaagaatccgccaactgcaagtcattcaagatttctctgacgtttgctgccacaaaaacattgtaaacacggtttttacgcagatttgtcttttggtggtatttaatttctggctgaacatggtaaagattttcaagcaattcataaatatggcgagcgattttagcattttccgttgtgatagacaaggtaagtccgtctcctgtcaagccgagactaccagacattttaatgattgctgataattcgctcttatcaaaccgcgacaaattgagcagttcttctttcacttttactgtaaaactcatcgcttcctcatcctcaccaaattcattaattcctcaacgacaaaatcgccattgtgaaaagctccgccattttccaaacgcaagaaatctgatgaaatcacacgtttcacctgcttgcgaagtcctgcaaaatcatgttctacttgaaccaaatactcatcaaattcgttagaattcatgtaatcttgcggtacttcttggatattaaccaaaacggtgtcaatcacatcttcgccaaggtggcgattgagcacttcaacatggtcagcgtcagtaaaatgctcagtctcaccatattgggtcatgatgttacaaacgtaagccacttctgctggggtttcaagcaaggctttcttgatttctggaatgacaagattgggcagaattgaggtaaaaagcgaaccaggtcccagaacaatcatatcactatccataatcgcatcaacaacttttcgactagcagtcggttcttcattgttataagtatttgtgacataaacgtggtcaatcatacctttataatcagcaatatgactttcgccaataacctcgtgaccgtctttgaaaacagcatgcaaagtcaatggattttcactggctgggtaaatctttcctgtgacatggaaaaattttgttagcaactgcatggcattgtaggttgaaccttgcatttctgcaatgcctgaaataatcaaattgccaagcggatgtcctgccaaagcaccatccgtttcagcgaaacgatattgaaaaactttttcgtagaattttggcatatcactcatcgccacaaggacgttacgaaggtcgcctggaggtgttagctgcgttacggaacgcaaagttccagaactaccaccatcatcagccaccgtcacaatcgctgtgatgtcaacttcttcatgccgtaagctatttaaaataacgggaattcccgttcctccaccgataacggtaattttaggttttctcatgaacgattcacagtctccttacgacgatttttatcacggtgggtttcattgacagcccaattttctttcaattcttctgccaaacggtgcgcaaaggcgacactacgatgttgaccacctgtacaaccaatggcaattgtcaaaacagattttccttctttttgataccctggcaaaattggtttaatcaagcctgtcaaatgttgatagaaatcttcagattcttcatgattcatgacgtaatcatagacttcttgttcgagtcctgtttggtcacggagttctggtttgtagtagggatttggcaagaaacgcacatcaaataccaaatcagcatcaagcggcaagccatacttaaaaccaaaactcatcacttcgatacggaaagacgcttgattttcttcacttgaaaattgctctgaaatggttttacggagttggcgtggtgtgagttctgttgtatcaaccacattttggctcaaatttttcagcggtgctaacaattcacgctcaagtttgataccatctaaaatacgtccgtcagctgccaatggatgactacgacgtgtttctttataacgagcaaccaattcaccatctgtcgcatccaagaataaaattttaaaatcaacttttggattggcatcgattttatcaagaacagaattgatttcattgaaaaagaggcgactacgcatgtcgactacgagtgccacacgattattgtcgctagattgttcaattagctcaataaattttggtaccaaagctggtggcatattatcaatcgtgaaataacccaaatcttcaaatgattgaattgccaccgttttaccagctccactcatcccagttacaataactaagttaatacttttgtcagacataattgtcccccttttatctactagttttattataacaaaattcagcctaaagattgattagaaaaaccttttcacacaaaaatttcaagtaaaatattctaaaaaatgctagctctaaaaaagaaaagacaggcttgacccctgtctctctcacctactcaaaatagtattgttaagcttgataaccgtttggattttggctttgccatctccatgaatcacgcatcatgtctcgcaatgttttttgtgctgtccagcccaattcttctttggctttgcttgcgtctgcgtagcaagtagcaatatcgccagcgcggcgacctttgataacgtacggaacggatacatgattgacttcttcgaacgccttcaccaaatccaagacactgtaaccatgacctgttccaagattatataccgctactcctttgctagcaagatttttcttcagcgcagcaacatgaccttttgccaaatcaacaacatgaatgtaatcacgcacaccagttccgtctggtgtatcataatcattaccaaaaacgcttaattcttttaatttaccgacagccacttggctaatgtatggcactaaattatttggaatgccatttggtgcttcaccgattaagccactttcgtgtgctccgataggattgaaataacgtaaattactcacggacaagtctttgtcagcataagccacgtcagtcaaaatttgttcaatcattactttcgtataaccgtaaggatttgtggctgaagttggtaaatcctcagtcaacggtgatacattattcatgccataaaccgttgcactagagctaaagacaatatgattgacatggtgatttttcatcacctcaagcaacgtcaatgtcccagtcaaattattttgataatagcttaacggctgttcaaccgattctccgactgccttaaacgccgcaaaatgaatcaccgcttcaatatcattttcataaaaaacattgtttaaaaagtttttatctaaaatagaacctttatagaacggaattttttgaccagtaatgactttcaaacggttcagaacttcttgcgaactatttgaaaaatcatcgacaataaccacatcataacctgctgaaatgagttcaactgctgtatgactaccgataaaacctgctcctcctgttaataaaacggacattctattcctcctctttccctttaactataaatttttaaccatggtattccccattgtattggataagtgtaacgtcatccacgtcctcaagtgcttggattttatctgtaaaactcaaattttcatctttacagaagacttccacagacaattcaatcaatcccttgcgaaccgtcttagcttttaagaaatatttcatcttaccaaaagattgcaagattttttcttctgtttcatcatggtgataatgaataactgcaatataaacttttccagcttgttggttgcgataaaagatgtaaaacagtgcaaccatgacaactgctgctaccatcgctagtaaatacattcctgcaccgactgttatccctgtcgtaattgcccagaaaatgtagagaaggtccattgggtctttaatcgccgtgcgataacggacgatagacaaggcaccgaccataccaagtgagataacgatgttggtactaatcgccaaggtaaccatacaagtcaaaatagtcattccaaccaaggtcaccgcaaaactgcgtgaaaagacgacccctgtaaaaaattgacggtaaatcagataaatcaccgctcccataatgatagatacgatgagtgataacagaatttgtcctaaatcatctcctgtataagaactcacaaaggagtttttcaaaacatcattaatactcattttctttcctctttcttccctttttcttaattatcgtaccaatagtcatttaaactacggctataatttgtcttgtcatagcaaagaacatacttagaaaccgctgtgtattctgtggcatctgctggaataatttctttgataatatctgggtaaaattccgtatatttgacttctaaaaccaatttttctggttctaacacttcaagcgttggtaaattagcgtcaaaaatatcaaaacttccaacagcagcccgaatattctcatcaaaggtaactcgcacagttcccgcttccaaggtccatggctcacgctcataatcgacaatcgtccgtggacgtaaaacattagccatgcattcgacataaaattcacgacaaagctggtgtgggctcttcagcaaaaagccataatcaccatccaaaattttgtaaaattcttcttttgtcaacggcgcatcttctttataaatgtaagccccatgcttacgtttccgttccaatttaatcacttggtcggtgtaattgtaaattcggatgcggtatttttttcgaataaggacacctgcttgcttatcttcataagcactgttccaataatcatcgaaataaagacttctaatcgtatagctttcttgtttgacgtgtttgtccaaagccataatatttcttatccgctgacgaatgaggtgtttatcctttaacgaaatcaagtatttttgctcatgacgaaatgcttccttagtcttcttcataggtatcctcacttatgctcttatcagcattgacaaagaaggatttcacaccagaaactttgccatcttcgctcgttacgtagtaatcaaaggcgacttgagattctccagaagcatttgttgctgtgacacggataaagtattgacctgcatcaggtaaatccatttctgtgctagttaattttagattttccttcctatatatagtacttgaaaaatcatagtttttagaaacttcaaccgtataagtaatatcttccgaatcaaaatcataagcattatcccaagttaacttcaatttgttatcgcttgttttacttggcacaccaatgaaaaatggcattggctttttgaaactgtcataatacttttgataattacccttgatttctgacggcaaagcatccaaaaccgtttgataatccgccattgaaattccgagataagtgctgtctggtgtttctgaaatgtacggtttaacaacacttgcaagctcatttgacagcgacgttatgcggtcttgcgttaaatagttattgtacaaatcttcaatagcagcatctaaagcttcgcggaagctttttgtttttaacgcacgttggaacaacatattaccccaataattgctaacgccagtttcccattcagcatccccttttgaacctcgaatttgatattctgtttcaaaaagcgacccgtcgttatcccaagggataatataccaacgctgagaattaagcggactatagagaaacatattccgactctgagtatcatgatttcccatcaaaatctgaaacgccatccaataggagagattctcaacatcaaagttttcttctaaaacatcctcaaaatcaatggacgtgtcattgatttttttaattaaatcaatcaattttgtatggtcagttgaccctttaatttcaaggagttcttcaaatttttcttcgtcataatcagggtcgctagccaatttgatgacattatcagggtcagtaaattcaaaatagttaaccttgtacagctgaccgctactatccaaattatgagatttcattcctgttttattaagctgctcaacttgggtatataaaccataatcaacaaattcatctgggttatctcctgtcgtatccttgacataaagatgaacaaattgcgtgcgcaaacttaacacttgtggaatatcttgaagcaacacatacgacatcatgtttcgaaaacgaagactttctgtctggtgtttattcagattaatcgttcgttgtccgtaccaactccccttattttgtttaattttgattttatagtttttctgttggtttttacttgaactttgtccgcgaatttggactgtcgcattaggggtactttcaccgtagccaagttctccagccacaggtccattttcatctcccacttgcaacaaagccgaaatcttatagcggtcaactcccattttttcataatcatatacggataaattattaacttctgaccatgaatggttagtattatcgctatcattcccacgtgaaacggttaaatacatggtctgaacatctttataatcttctgtttcataaagtgcatcattgtccgttaaatgataactgtcctctgcaacagtcgttgttgactgcgttgtggtgtcgcttgaatcgtcgtcatcattattagtaaaaagcccaacaatcaaaacaagcccagctgtcaccactaacagtaaaatgactaataaaaagctcttgttatttttcataattcccctttctagtcaaagcaagcattttttgatttaaaaaacttgccaaatggtgaaagacaccatctttttccccataaatcaatggctgccgccctaaaatctgataggttagattgctactgattttttctaaatttaaccaagacatgacaaaatacagcattgttgctaccaaaaagccaaaaccgtaaaacagactattagtatataagctagcaaccgttgctaagatagaagtcaaggcaaaagcaatactcgcacgataactgcctgataaattaccaaaataaatcgtagataaagtgacaacatttgccatgccataaaccgcatatgccacacacaagattctaaaataaccattcatggtcgtattaaaacctagtggcaaagcatttagaatcgttgtcccaacagaaatagctaatagcgtaaccattaattgaacccaaacagtccgtcccaagccttttctcaagctgtcagtcatgtctctttcagcttttttgatttcctgcaacgtcgcgccattcgtaaaactaaggtaatacttgcgataagtattgaagaaatcaacttccatggaaacgataaaacgtaccgttgttgctaacatggtcaaagaagctatgaaaaccgttaagtcataataaggagcaatatagaagaaaccacgcacctgctgcccaatttgactaaaccaaatcacaacaatatgccccaaaagaccaagttgtgtgcataagccaattaccgccaattcccaataatcatcaaagccattcaaaaaatcaaacatgtgatgataatccagtttatttggaaattgttggtacaaaagattggttgctaaaataaagaaactagcatatccaaaaataatgcctgctaaactcgcaatgacaactggcaaatgaatgaacaagaaaataacactcatcaccaaagtcgttactatcgttgcaagaaatgctctgaaaattccccaataatctttgataatcgtcaaataattaatcacattccaagacaacaacaattcacaaaataacagccacgccaaaataccatacaaccagcccaaatgtgaaaataatagaaagacaccgtataaactaccaccgattgctagcgtgaaaaattgacttccccagtaacttgtcaacacatggcgaatatctcgtgaataaatcttatccgacaaataccgcgaaatcaccaaggagcaatatagaagaaaccacgcacctgctgcccaatttgactaaaccaaatcacaacaatatgccccaaaagaccaagttgtgtgcataagccaattaccgccaattcccaataatcatcaaagccattcaaaaaatcaaacatgtgatgataatccagtttatttggaaattgttggtacaaaagattggttgctaaaataaagaaactagcatatccaaaaataatgcctgctaaactcgcaatgacaactggcaaatgaatgaacaagaaaataacactcatcaccaaagtcgttactatcgttgcaagaaatgctctgaaaattccccaataatctttgataatcgtcaaataattaatcacattccaagacaacaacaattcacaaaataacagccacgccaaaataccatacaaccagcccaaatgtgaaaataatagaaagacaccgtataaactaccaccgattgctagcgtgaaaaattgacttccccagtaacttgtcaacacatggcgaatatctcgtgaataaatcttatccgacaaataccgcgaaatcaccaaggaaacaaatccattaatcaaaagcgaaccaagtaaaccataagtgataatggcaactatcagattgcggtcagtaatcgttacttttgccaaatttgacaaaataaagaccgtcagcagaaccagttcacccagcaaaagcggtgcgacagtaacaatcgaggcataagcaaaggcgcgtggttttgaggtcaaacgtttttctctaacaaccttattaatggcaaatccaattccagccatcaaaccacctccaaatacaaatcacgatattgctgaatcatcatctcatagagataataagttttcgcacgtttttgagcaatttcacccattttcaatcgcaactgacgggaactgcacattttttccatggcatgtgtcagacctgttcgataagttggcggaatgcaataaccagcaatgccgaggtggtcatccttatttccctccaacaattctcgacaacagccaacatcagttgtcacacaaggtctcctagccgccatggattcaatgacagataatggttgcgcttctgagatacttgttaaaatggtaaaatccaaattttccatgtattcaaccacattaacttgccccgtgaaaatcacatttttgatgcctagttgacgaatcaattgatgacattctctgttatagtcttcatcatcaacagcacccaaaatatgcaaacgcgtattgggataattgcgagacaattcataaaagacataaagcattgtcttaatgtccttgataggtgcgatacgaacaaccgcgccaatatctatccaaccgtcttcttctttcaaaggaattgctgaaaatcggtcataatgaatcccatttgaaattactcgacatttttcaatgtcacacccaacctcttcttgaataaacttcgctttggtataaaggctcgtcacgcgctccgccttgtcatagataagatttgacagcatatagaaaaattgaatccattgccgtttcattgttggcaacacccaatctgaccgcaaaatttcttcctcacgctctcgcgtgtaaatgccgtgctctgtcaacaacaacggtgcttgatgctgataacttcccaaagaagccagtaaccctgcataacctgtcgcaatagaatgataaacatcggctttcggcatatcttgggtcattagataaagaactgttaataacatggaacgtgttgtgtgaaagacgtctgcaaaagcttggttttgatgtttttcctcaacaatttccgtcagcaattccaaaaacaattgactttccaaaaaatcagtcggattaatctgacgctgattaaaaatgtcaaacaacacttcccaatcaggagattgacaagatagcaagtctttcaatgcttgtctctccgtatcgttaaacgtttctttgaagtcagaattcccagaaacttggaaagcatcatccagaaaaacttccttgacctcgaccacattgtcagccagttcatatttgaatttaccacgactttcagcatttgctccaatggtcactagaacaaattcgtgctcagtcatttcattaatataattgtgcatccatgatgacacgccaccattgacgtaaggataacacccttccaaaattaaacaaatacgcacctattttccttcctaaattctcaaattctcatttttttagcaatggtaaccgtgcttgacgttgcatgcaaaaggtagagattgcccgtcaaatgttccaaactaccgcctgtcacatcaccaggcttatcactgttaaaccgcaccatcagatacgcctcatcaacaaaattaccgagattgaattgataagaatcatccgtttcttctttttcgaccgtaatgcttgaaaagcgttgaatggcgccacccatttgtgattctgtcatgtttcggatagaaggcgctgttttgtacaaccacgacatttgcttagacaaattcttgtacaattgagcccaacccaattttgccccacggtcaacgtccagagggtcatctgggtgaacaaaatgatgactcacataatgcatattcaactcagaaaccatcgtcaatttcgtgtaatcatcaataatagctcctgacgttatccgcggttcttcgataacaccgtcatctgccacttcaaactcttgctcataaacaaactcttctgaaaagtaattactagcaatcaccttgatatttggataatccttcgctaacaaggctctgctttctgccgataaaatatttgaaggcggaacataaaccgaatgttcactcgttgggaacaaattctccgtgaaatccattaattcatctaacgacttttcaatcgctgtatcactcgtccacgtattgtaagaaaaagcatcaccgtaatccgtatccgataacatcaagggttgatgattgtaaccgtgatagccaatttcaccgcccatttgcaatagcatattaccaaaataagtaaatcgcgaactgtccgactgacgctcggtgcttcctgtcgtatcgtcctcatagttttcaataataacgcccgtgtatttaatgccatatttatcagccaggctcaccatatttggccaccaaacattcgtgtaaaaatcagacaccgtcatctgataatcgcgcgtaatgtatttcgcatcaccacttggaactggtgagggaaaatcatctaaggtaaaagccgcagaatttatcacaggataaacaccaacgtctcctagtaacgaatacgatgcagaataaaaaccacgcattgccttgacataaataccaaaattatcaacgacaacgcgaccgcttcctaaatcatattcccaaaccagagggattttactgtcgtctcctgttgtcaagtaaacctctgcattgtcatcaagttcaactgcccaagcagactcaaacggttcatcaatgttgtaatcttgacctgctcccaacatgaaaccatttttaattgaaacttccgcgacctcagcataagtataggacgaattgaccacgcctagtttatgttcaatgattgaaacaacatcatctttttgcaatgtcattgcaaacatgacattcccacctgattcaacccattccattaaccgaagagcagcttcgccgagaggttctaaatctggcgttaaaataactaccgtatcaaaggttgtaaaatcaggtaccgtttcattggcaatgtcaacgtaagtcgttgcaaccttcatatcttcaaaaatctgcttaaaattatcaatagcactagcagatgtctcattacttgaatcataaatcaatagattggtcgctgaaacgttagccaaagcttccgccttagttttaacttgattatcagacaaataataactgtcactagtatcgctataataactaatcccattacgctcaattagcagccctactgccaacaccacaagaataagaaaaactgggagaatcagcgtaaatttaaacgttctttttttaaacatctattttcctcattcttacttactgccaaaatgctaatttggctttattttctgctgaaaaataaacatgattttgctctaaatcttgccaaaatcgtttcaaatcagaacttgatttcttcaatacaatcgtatccagtttcaacatccaaatatcttgatcatctggaaaaagctcaaaaagcttcgttaataaacgctccaagctcacaaaatcacccaaactctgatagatttctgccaaagtcagcaaacgtgatttttcaacaaggaaaccctttgccaataaatcctcaacctcatcaatataagcttgtttcaatgtcaaaccataatgtccctctgctatcccactattgatataactctctaaaaagtcagcgtatttctgacgtttctctagcgaatcaggttctttttgaacacgttcctccaactgacgtaaacgctcatcatattttgcggtcaattcagaaagaatcgttgtggcataatgaaccacttcgacatcctcgttcaaacgtgcctgatgtaataaggggacaaattgatctggcgactcaaaaataacatcaataatcagttcacgtttaatccccgaattattaagcaaaagcgcctcttgaaaaggaacaatatttgtaatgtcaagcatgacattttccttcatctccaattgattttgctcaaccgtatcatctattaaccaaggaatcacttcttcaaaagcaagttcaccatcgacaaagcgtgattttctgtcctttaaaatatagagaaccgatatagcaccaataagcggtaaaaagacaagaagtgatttgagataaaaatcaagttgaatcgttttcattttcgctactaagaaaaaactaacaacaataattaaatggcatcccaaaaacacagcaaataacattaacttctcctcctcacgacatcatttgcctaaatgcaatagactcaatcgtttcctcaatattgcgttcgtcagcaacatcaaaacttaaatcagacaatttctcatgccagtctgttaaagattgcgtgtaagtattgattaacaaacaaagctggctttcaacttgtcccaagctgtcaaaaagtgacaattcttcctgcaagcttgtcaacgttgttttaggaatttcctctgccacaacgcctaagtgcaacacttgccccacaaaataaggagaatcaactgcccttaacgccaataatttttgacaaaagactttttcttccaaaatctcatgctgaacatttgacgttgttttttgacaaagacgtcgataactcaaacttgccaatcccattaaagacttcaacaagttttgatgataaagattcaatttatctgtcggtaaatggtcaagcgatagataataacgcagatcgccatttacaaaaattcccgccaaatacattggataatcatcccgcaaatgctgattgacccaaaccgtattgttaaccaactgttgactaactttacttaactgttctgcggttaacatgagatgagtggtattttgtgctgttgtcaattgcaacttacttgtctgattatcccttacttcataaatggcaatctcatctgtatcaaaaatattgctaatgtaatccaataatttgaccataaaaatttccagatacggtgtttccaaatcttctaaaaagcgataaatgcgaccataactatcttggcgctccaaaatctgatgcgttagctcaactttctctgacaacaaatcttcaacaaacgattcttcatcagataattgttgctccaaatgctcattttccgctaaaattctaaataaatcagcttggtctttttccttaacataaccactcactaaaccagaaacaagatagatgatatatggaatccaattggctggttcaaaaaagagcgtttgcaaattcgtctcgcctgccagaatattttgaataatcagtccaattgatgcaaaaacagctgcccagataccgtaaaacatccccaagctcaagccagatatcacaatggcaaacaagcgatagtcaaccgttttaaaatacatttgattgctcaataaatgtgacaacatttccccaagaacaaacaaaacaattaaaacgatcactttaactgatgttttatctaacttagccaacttccttaatctatccgctaacgagagagttttttgttctttagcagaagttggcaagtcacgtgttgacaaatcctctaaaagagaaacttttggaaaccaaccatagtcttttctcagattagaagtttgtggcttcaaaacagacaatggggcttcttcagaaaatgtagcaccataaatattgagctcttcaaaaagttgctgaaaagttatgccaaaactatctggaacttctattctttcaaaggtgtcagtccaattatcaaaaatacgacgacacaaatccaataaatctcgcccaaaaatataataagctttctggtctggatgtagcgtgatatccttatctgacgttaaaatactgcgcaaatcatctgttgaatttgataattggtagagataaagcgattgcaaaattttcaatgaaaaatgttgttgctgtgaataacgacgcagaagctgctcataagctgataacataacgccacggctattctccgtttcaaaacgcaaatcaggtcctgttacatataaaaattccacgaaaaaatcctcagttaaggcattgaggatttttctaatctgcaataattcgccatcaagatcctttgaaggttctacggacttagaaaaatataaaattgatgtcacatgataaacagttaaaagtcgtccaatatcagtttgatttttccaatcaatgctacggattctatgttttgattcactaactttccctaagactattactttttcttcaggaaacatctttaacaattcactttcttttaacacttcgacattccctgctattaaaatcgccattttacatccctttattttaataatatttgatttttttaaagaataaaaaaacttatttccaatattttatcattttgttggtgttttgacaaacaatgtttatacttttaatgataatgtaatttttaaatcaatttcatattacatttatagcttcttttattttaataaaattgctcttttctgtctatatttttaatactttcatccaaaacaaaaagactagaactagtcattctaatcttttttgcttattccaaattatttttagttttaccaatcaaacaaaagcaaggtatccgcgtcttcttgcccagatactacaaaatgaatcgcattttggtttgtcattggatcaacaattcctaaagaaatactgtagtttttctctaatttttttagattttctaaggggagttcaacactcaccgattgttcttcgtccggaagaattttagtcacatctaagtctaaggcgattgcttggacgctatcatcatttttattttttaaataaatgtagctcgtccaatttcgataaaaaggagcaacacctgaattttttaacgttagcttaagcgttaatttttgagacaaactctgcttgatacttgcagatgtgacccacaaacgatagcccatatttttcagcagctcatcgtaacctgcgttgtcatcaccaatatcttcagcgattttgggtcctaaaaatgttgtgtgtgactgggctactaggtctattgtctgtgacagattatcagctaaaagactactcatgctatctgagcttgtcaattcaccaccgattggcgctgtttgccaagcattaggcattgccactaagtcattttcccctgtctccgaataaacaccacctgaggcaatccattctagccattcttgagtggctttctgatttccagccatgtcattatacagccctaaaccattttcactcgctactgtaaacggtcggcgcataagcaaattagcatttggaaaagctgacaaccaaggtgtgacatactgttcacgaacggattcatctggtaactgacgaatgcctgccgtgctatcaacatgccattcgccccagtgccctagtcctcctagttcgataaaactgataaactcatcatcaccccaacgttctcccattgcttgaacagctttttcataagcagcaatcaataccttgctttcatagttaggtgaaaaacctttcccataatccgaatcgtaccaatcccctgcatcatccagacgattgtaaagccagtctggaatatctttacgcttttcatcacttggataatctaagataaaacgtaaaacaagatgttttccctcactacgccatctatcaaattgattttcagattcaatgtcatcccaattataaaggccttcttgcgattctaattctcgccaagtaatgtcaacatacaaaagcgtaatatcatctgtcaccgtttcttcagtcgccacaggcgcatatcccattagaggattactaacaacctctgttgaataagtaaattgcttcttcacacttccaaattttacaacataaaccacacagaacaagagaaacaacgctaatatggtcagtaaagtaattatcatacttttcttcatacctaccctctcctaaaaaattgccttaattctgtgtttgttttaatgcattcatttcctcaagtaagtctttattttgcttttgcaattcaacaacttggtcagtaattgatgccaacatctctgtttgcaatttttgaatttctaacaaatctgattggtcttgttgcaccaagtggtcaagttttgtatgcaatagccgaatgccttcttctgaaactttgttgacattgtaatcattttttgcttgcaaacggtcataatctgatgcacgattttgactcatcataatcaaaggagcttggattgcagcaattgtcgataatgccaaatttagcaaaataaacggatattcatcaaaggcaattccaaaaggtttaatgacatttatcgccatccaaattaccataaaaacaataaatgaaatgataaacgtccatgaaccaccgaaacgtgccacatcatcagcaattcgttgaccaaaggtaattttcttatccaactggtcttgcacgtccaatgctgtgtaattctttcccttagcgacatcgtaaaccgattctcggacaaaatcattcttacgattggctttatcaatcatttcatccaaaaataacatcctataatgcgttaaatttttattactgataaaatcattatccgatagttcagaatgttcttgcttgataatcccacgcaaacgaacatctagctcagaaaggaagacaccttccaccattggatacaattgatgatcaataccatcataaattagctcttcatcactcataaattccctctttctatttccctcattataacaaaattaaaacaaaaaagctgatttctcagcttttgaatgtttttttaatgttttgttagtcctcgcggtcaataataacgcccatgacggttaggtgtccattgctgatgagggttaggaccaagcgtgctaattctttagctggcatagaaaaatctgattttatccaccatagcaaagtgcctgtaaaaatactggttaagtaagcgacgataaactctgttggaacttgctcaccagattctgtaacgttcagtttggcaagtaggtgatcatatttttcatggagaagcgttccaaatttttcttgcataacttcttgcgaaatgctgcgcagaacaattttagcaatggctgaatttttctccaaaccatggtaaaaatcagtcaataatttttcggctcttttcaccttgacacggtcaccatttgtgatttgagcaccgtcaatcatgtcagacatttggtccaaaacttgctgttgaatcccactttggagttcatccttgtccgcatagtgcgcataaaaagtagcacgattaatcatcgcttcgtcagcaatatcttgtaccgtaattttttcgtaaggtttttcactgagcagtttggcaaaagcatcaaaaatcaatttttcagttcttaaataacgaatatctgtaaatttcatcggttctttcctccgagataagcaacactttgttgaacatgtgttgtttaaacaacacaactttaaaaattagcgattgaatttgacaaagagtgttctataatattattatagcaaacagtttgttgaataagcaacagattgttggcagggtaacactgtgttaggtaaaacaaagaaaggaaaaaatagtgttaaagacctatttgcgtggataagagggaaaattttctaagaaattcgattttcatctcactaccaccgccttctaacacttttggtattttattatatgtataaagcaggtatagatgtcggatcgacaactgttaaagttgtcatcttcgatgataactatcaattattattctcacgttatgaacgtcacttttcagatgttaaaacggcaacaattaaagttttaaaggaagctatttcagaaatcggcgaccaaacagtcagtattgctatcacaggttcagggggaatggggttggcagatgtggcaaaaattccatttgttcaggaagttattgccgctaccactaccgttgaaaaattcattccacaaaccgatgttgttatcgaacttggtggtgaagatgctaagatgacattctttggagatgcccttgaacaacgcatgaacggaacatgtgctggtggtacaggtgctttcattgaccaaatggcagaacttttgaaaacagatgccaacggcgttaatgaattagccaaaggctacgaaacaatttatccaatcgctagccgttgtggggtatttgccaagacagacgtccaaccattgattaatgaaggggctcgcaaagaggacattgcagcttctattttccaagccgttgttaatcaaaccattgctggtttggcttcagggcgtaaaatttctggaaatattgcctttcttggcggaccactattcttcatgagtgaacttcgtcaacgtttcattgaaacactcaatattaaaccagaaaatgttattttccctgaaaatccacaacttttcgttgccatgggagctgccttagatgaagatcaagcgcaattagcactatcagaaatcattcataatcttgaaaataacacttcaaaatcgctagttcctaaaaatacactagatgttcttttcaaagaccaagctgaattagacgcttggcgcgctcgccacaatgaagcaagtgttgaatataaagacatttccaaagcttctggtccagtctttctgggaattgatgcgggttcaacaacctcaaaggttgtcttgactgatcccgaaggtgctattttattccaacactatggcaacaaccaaggacaaccacttgaaaatgttatcgaaattctcaaagaagtttatcgccaattaccagacacagcctttatcgcacgctcttgcgtaacaggttatggtgaaaatttgattaaagcagccttgcacgttgactatggtgaagtcgaaaccgttgctcacttcaaagccgctaattacttcaaccctggtgttgatttcattctcgatatcggtgggcaagatatgaaagctatgagcgttcaagacggcgccctctcaagtattcaattgaacgaagcttgttcatctggttgtggttcgttcatcgaaacctttgccaaatcacttaaatacgacgttaaagactttgcacaagttgctttactagctgaacaccctgttgacctcggttcaaaatgtacggtgttcatgaactcaaaagtcaaacaagtgcaaaaagaaggcgctactgttgctgatatttctgcaggactttcttattctgttatcaaaaatgcgctttataaggttattaaactcaaacgtcctgaagatttaggtgaaaaaattgttgtccaaggcggtactttctacaatgaagcggtgctccgtgcctttgaattggtcagtgaacgcgaagttgttcgtccaagtattgctggtctgatgggagcttacggctgtgccattattgcccaagaaaaatacgaagacgaaaccgctcaagcacctgccgttgaaatggcaacagtctagtaaaaggagggaagcatgaccgaaacattacttgaacataatcgtgccaaatcaagcttaatggggcttgacgaactagatcatttcacaacccaaaaagaattcacacgttgcggactttgtgaaaacaactgcgcattgacggttacgattttcaacgatggctcaaaatttgtcactggtaaccgttgtgaacgcggagctgaaaaagtcactaaaatcaaatttggccgcagcaatcaaaaagaaaatctcgttgattataaatataaaaaactctttaaattcaaagcacttgctaaacgagatgctgtacacggcattatcggtgttcctcgtgtgcttaacatgtatgaaaattacccactttggcacactatcttaacagaccttggtttccgtgttcaactttcaccaaaatctgataaaaaattatttgaaaaagggattgaaactattcctagtgataccgtttgttatcctgccaaaatggtacatggacacattcaaagtttgattgaccgaaaagttgacgctattttctacccaagtgttatttacgaacaaatcgaaaatagcaaagcacctaatcactacaactgcccaatcgttcaaagttacccagaagttatcgaaaaaaatatggaccctatccgtaatggtgaggtgaaatatttccatccatttgttaacttggctgaccacgaatctgttgtaaaatcattgattaaagctttcagcgaatacgaagatattacagctgaagatattcaaaatgccgttgaacatggttatcaagcgctagctgatttcaaacaagatttgcaagataaagctgatgagctcttatctactcttgctctcaaaggtgaaaaggctattgtcctttcaggtcgtccatatcacctcgaccctgaaatcaaccatggtattgccaatatcatcacgcaagaaggcttccatgttttgacagaagatatggtagctggtcttgaagaagtttcaggacttcgtgttgtgaaccaatgggtttaccattctcgcctttatgcggctgccaaggtggtttctaagaatccaaaccttgagcttgttcaactaaacagctttggttgcggacttgacgcggtaacaactgaccaagtcgaagaaatcatgcgtggtcacaacaaactatataccgtgctcaaaattgacgaaggtagtaacctcggtgctatccgaattcgtcttcgttccctcaaagctgccgttgaagaacgtgataaaaaattcaagaaagctaatcttgaccacattttcaaccaagcaccacaatttgataaccaattcgatgaggaagaagaacgcaaagaacctgtctttactaaagaaatgaaaaagacacacacgcttcttatgccaatgctttctccaattcaccaaaatggtcttatcgaagaagccttcaaacacgctggctacaacgttgtcattttacctgcaatggacagaaaagccgttgatgtcggattgaaattcgtccataatgacgcctgctaccctgctatcatttctatcggtcaattgattgaagctcttcaaagcggcgaatatgaccttgataataccagcgttatgatgacccaaactggtggtggttgccgtgcaaccaactacattccacttctacgtaaagctctgaaagacgctggtttccctcaagttcctgtggtttccatttctatgggaaatcaaggtaccgaagaaacaccaggttggagcctcacttattcattcgtcaaacgcctactcatcagcgttttgtatggtgatttattcgaacgtgtgctctatcgtgttcgcccatacgaagccgttctaggctctgctaacgctctttatgataaatggcttgaaattgctcgtaaaaatgtgagatcaggttcatattttgaatttaatcataacatgaaacgtatcatcaaagagtttgatacccttgaaaccgttgatttcggacaaaaacctcgtgtcggtgtcgttggagaaatccttgtcaaatacgctccaacagctaacaacgacatcgttgctatcattgaaaatgaaggcggtgaagccgttgttcctgaccttattggctttatgaattattcacttttcaaccaaatttggaaagctgacgagcttaatatgagccaaaaagctaaacgcttcgctaagcttggtattgatgccattaatctccttgaaaaaccaatgaataaagcccttgaaaaatctgaacgctttgaaggcattgagtctatctatgacattgccgaaggtgcttctaagattatttcaattggtaaccatactggtgaaggttggttcctaacaggtgaaatgattgaattgctcaacaatgatgtcaaaaatattgtctgtctccaaccattcggttgtttgccaaaccatatcgttggtaaaggtatggttaaagaacttcgtcgtcaatacaagggtgctaatattgctccaatcgattacgacccaggttcatcagaagttaaccaattaaaccgcattcgcttgatgatgacaactgccaagaaaatgcaaaaagcaacactcacaagcgctaattaatacaaaaaaaactcctgcttagcttctgactaagcgggagtttttatgttatcctaggcagaaatcaactgctgccatttcaggcttaagcccaaaataaaattagtcaagataagcaatgacttcgatttcaactttgacgtcttttggcaaacgagcgacttctactgctgaacgtgctggaaaatcagccttaaatgccgtagcgtaaacgtcattaaacggtacaaaatcattcatatcgctaaggaaacaagttgtcttaaccacatggtcaaaatctgtgcctgcttccgcaagaatagcagaaatatttttaagaacttgcttagtttgttcttgaatagttgttccgataatttcaccagtttcaggtgacaaaggcacttgacctgaagcaaataggaaattaccaacgacctttccttgaacataaggtccaattgctgctggtgctttatctgtgtgaattgtttttgccatgataaactccttctctcaattaagtagctctattatagcaaaatattctgaaaattaaaacattttatagcttataaaactgaggaatatttgggattggcttttctgatgtgattgccataaataggttttagagcttcaaaagcagctactactctattaggaatatccacatgagctagaaaattctttccatttggtccataaccttgttcattatctgttaatcttggaatctcacccattaataaattgatatagcgctcaacatcccacatgccatgaatctttgttgcgtaggtgagtttatcttggtaattcaggtaagctcgataagcagcgtaattaatcactaccgtatcttttgaaaggtattttcgtaatgtcgcttccatacgatattgcatagtcgcatcttggcataaaatgatactatggtgggcaatgcctttgttcttcattaatttgagcaaattcgtgatattattgccacaatttgttgatttggtttcaagatagtcagcttggatttgataaacagtcaaaagatattgttgaaaaagttcagcttctgtcaagccatttacagcaatcaaagggtattctttgtgaatctgctctctcaaggtagccgttgtatgtccttcaccaccaacaataatataatgctctgcaatatcatctttgatagccttagccagtacatcaccgccagcaagaatgctaccgccaaaaagaaccataacatctgctttttctattccatatttttcatgcaagtttttctgattaagttcctcaacatctcttttgccacaaaattgaccaaggatattaagattttctgcaattttttgattttccattggcaagtctccgagaatttttctgatttcttttggcactaacgtcgaatgaattttgacggaatggcaaggggattattttcatcagccaaaatctgacgtactgctaatttccccagttcataagaataatgctctactgacggaatcccaagtaactcactaatatgctgattttcttgcccgataatcaacggcaaagctctgccattatccttaaaagccttgataacgccataagccatttggtcctcattcgtcacaattgcatcaaaatcctgcgtaagctgttttgcccaattataaccgtcttgaaaattagaaatgccactaaaaacagctgaattttgatattgcggaaaatgttctaaaacagaaaccattgtccgataagtcgcactagcttcatcagctctcgtaaaaagataagctggtgatttaatgcccgtttcaactaaataggcattaagatcattataagcttggtagcggtcaacatagactgatttcaaaagaggattgtcaagtggctcacataaaagaatgggaccgtattgtgcataagaggcaatggtctctatcggcaattcacgtgacgtaaagataagcccgtcaaaagcacgaccacgtaattgttctaaatactcacgttccgaaagttcattgtagcccgaatgtagtaaaagcaaattatggtttgttttcttactttcgtctagcataccattcaatagctgagtgaaatagggatgacgattgtgaggaataacaaccgcaattttattagtctttccagcactcaattcttttgcgaccaaatttggcgtataattaagctcttttatcaccgcttgaatttttcgacgcacgtcatctgacacataaggatgattgttaagcacgcgcgacaccgtcgctttagaataacccgttcgttctgcaatatctctgattgttaccatttaaacattcctcaaaaatttatgaattccataaccaacaccattgcactggttaaccaatgtgataaatttagcttgggcaatcacatctgggctagcatttgccattgcaattggaaaactcgtccgttcaaacattggcaaatcattgtgcccatcgccaaaagccgcagtttctccctcgctcaaagcttctttttgcatgatataatcaatacctgctgacttcttagctgccgtatgagtaatttccaaataatgttttcctgattgctgcaccgcaaccgtgtctatccctaatgatagcacaaattcttgtagatttgttaacgttttctcatcaaagacaatcatcattaacttataaatctcttttttaggttttaagaaatggctgagcaacattgtccgtgttggtttttgttgcgtaactttctgctcaaaaagaattcccttgtcaatctcatgacaataccatttatgcaaatcatagtatgacaaactgatctctggaaatttctcatgaatcgcaccaagaagagtatgaacatctttttttgctattggttgactgtgaatcggaaggacacgaccattgtcaacacgataaatcaaaccaccattaaatccaacttgtgcacccgtcaaatctaatttttcaatcgctgccatcatttccattggagcacgagctgataccaaggtcatcggaatgccagctgatttaatcagagaaacattttcctctgaaactgcaccagtattgtcaagaagcgttccatccatgtctgaaaaaatacgtttaatcatcttttttacctcgcttgtttgatttgactaaagtataatttatgaaacgcgttccaggtcaagccctttttaaaaagaaatttttttcatttattttcaagtatttacaaaaagcttctttacctttataataatagtcgtgcataatcagtgatgccgttagttatttgactagtcattgtcaattctaaatacgctcccaacctcatggtaactaaaacattgacatgacgtaaaaaagcaccctggcgagaggaattctcactgttagggtgcttttattatcttaatgattgtttttctcattacgtttttcttttaaggcagctgtttgtttacgaatttcgttcaaaaatggcgctgtcgttaagcggaaatttttatagtttctaagcatacgacgttgattgaaacggaatggctcgattcctttttctctcaaggtttcattgatgtgaagtcgtaaattttccaaacgtttgctaaagacctcagcttgctgtgttaaatcaccaacttctgttcgtactgattcgcgtaatttttcttgctcggcacgaacgtatttttcaaaagcaatagcagcttgttggaatttcaccgtatcgacaactgtccaaatcaaatctgctgtcatcacaataacaatacctaacgctacccaatcattcaggtgattaattagccacatcactcctggttgaataaattcaacgagaacaacaattccaaatccccagaaaagtgatatccgcggtgcaatacgtccctgaatattaccaaactcctgactgtagtcccataatttcatatgaaagaccgtctctaacagccagcctgcaacgtattcaaatgctgttgctacaagcaaaccactcaagaacagccataaaatattgctctgaaacggctctgtcgctagtaaaaccgttgtcactgcaaagccataaacggggcaatacggtcccactaaaaaaccacgataagcaaacttcttatccttaatcgaacaataaaccgtctcccaaagccagcctacaaacgaataaataaaaaacaaaaagacaatgtctgccaatgaatatgtcataaaactccaaccttctaaaattcaaactattctcattatatcaaaaaacctagaacatgacttgttctaggttattattttacaaattttcaatgagttttgctgcaaattcacttgttgagcaagctacttttccttgcgccaaatcagctgtaaattgaccttgagcgaatgttttttcaatcgctgctgtaattaagctagccacttctgtccaaccaatgtaatcaaacaacatgcaaccagacaaaagaacagaacatggattggcaatgtctttaccagcaatatctggtgcagttccgtgtgtcgcttcaaaaatagcgtgacctgtcaagtagttgatattggcacctggtgagattccaataccaccaacttgggcagcaagggcatcactagcgtagtcaccattgaggtttgtcaaagccacaacatcaaatttttcaggattaagcaaaatttgttgcaagaaattatcggcaataatgtcattaatcaccaattttccgctggctaattcatcagcgtattcacgttttgcaaggtcataaccccaactacggaagccaccttctgtgaatttttgaatatttcctttgtgaacaagagtaactttagtcaaattgttagcaagagcgtattcaatcgcagagcgaatcaaacgttcactaccttcttgtgagataggtttgattccgatactgcttgtttcaggaaaacgaatcttgctgacagacatttcattttgcaagaaatcaatgacttttttcacttcttctgtgccagcattccactcgatacctgcataaatatcttccgtattttcacggaaaatagtaatgcttgttttttctggttctttaagtgggctttcaatccctttaaaataacgaacaggacgcacacaagcgtataaatccaattcttgacgaagggcaacatttagtgaacgaatcccaccaccaactggtgtttctagtggacctttgatagcgaccaaatcttctttaatcgtttcaagagttgcttctggtaaccattctcctgttgcttcatgcgcttttttaccagccaaaagctcaagccattcaacttttttctgaccttggtaagctttttcaatcgctgcatcaaagacagcacgcgcatttttccaaatgtcacgtccaacgccatccccttcaataaaagggataattggattgttagaaacagtcaagtgaccattttctaaaatgattttatctgccatttttctcgtttttcctttctaaggctttttagcgttcttcaagtggtgtgtatttcaaaccgagctctccagtataatgagaacgtggtcgaatcaatttgttatttttttgttgttcttgaatatgagcaatccagcctgatacacggctcattgcaaaaataagggtaaaaatcgaactatcaataccaagaacatggtaaaccgttgccgaatagaaatcgacatttgggataagccctttagtgtgtttcatgtaatcttcaatttcacgtgacaagttgaaccacacttcgttttcagtaccttcggtaagagcttgtgccatttcacgcaaatatttttcacgtgggtcttgtgttttataaacacggtgaccaaatcccatgattttttcttgcgaatccaatttttctttcaaatacgctttggtatcacccatttcacgaatttcagttaacatgtcaaagacacgttcattagcaccaccgtgaagtggtcctttaagcgtaccaattgcagttgtcacacaagaataaatatcagccaatgttgacgcacagacacgcgctgcgaatgttgacgcatttaattcatggtcagcatgtaaaaccaaggcacgatttaaagcttttacttgcaatggtgttggttcttcgccgtttaacatataaaggaaattcgctgcaaatcctaaatcttcacgtggagcaactggtgttttcccgtcacgtaaacgcgcaaaagttgcaataatagttggcattttagccattaattgaatagattgttcgtatgtcgcttcttcagaattatcttcagcattgacattatacacaccaagtaaactaactgttgaacgaagcacgctcattgggtgcaaatggctgcgcgactgaatcataatgcattgttcaaccgcatcgctaatagcataattttcacgaagttctttaacaaaactatcaaactctgctttatttggcaagtgcaagttccaaagaaggtaaatcacttcttcaaaactagcatcgttatccattaattcagaaatattataacctgcgtaggataaattatcatcaataattgaactaatatgggtattacaagctattaaatcttttaatccgcttcctcctgtcatagattacgcttcctccaatttctttctaacaaccattggtaagataccgccgtttttatagtaacgaatgtcagcgtcggcatcaaaacgtaccatggctttaaagtgtttttcacctgagtcatcacgagctacaacatcaacaatatcgtgaataccaggattttctgaaagattaatatcgtatgtttcaagaccagttaaaccaaggctttctgctgtatcaccttctaaaaattgcaatggtaatacacccatcatgacaagatttgagcggtgaatacgttcaaaactttcagccaaaacagctttaaccccaagaaggttagaacctttggcagcccagtcacgactagatcccataccataatctttacctgcaatgactaaagtatcgacattatcttctttataatgcatagcagcgtcataaattggcatgatttcgccgttgtattttgtgtaaccgccaattttaccgtctgctaattggttttggatacgaatattggcaaatgttccacgcatcatgacttcgtgattaccacgacggctaccatatgagttgaagtcaacgtaatcaacaccatgattatctaaatacttagcagctgggctatttttagcaatattaccagcaggtgaaatgtggtcagttgtcacgctatcaccaaatttggctaatggcttaagatttttcaatggtttaatcgctaaatcatcacctagattatcaaaatatggtggattttggatataagttgacgattcattccaatggtaaatcttactttcttctgttggaatttgattccatttttcgctgtctgtaaagacatgctcatattcttgctcgaataattcacgcgttacgtatttattgacatactctgccacttcgtcatttgttggcatgatgtctttaaggtaaacagatgcattattttggtcaaagccaagcggttctgttgttaaatcaatatttgtgtttccagcaagtgcatatgccacaacaagtggtgggctagcaagaaagtttgctttgacaagtggattcacacgtccttcaaagttacggttacctgataaaacagcagatgctaacaagtctgtctctgtaatagcttctgccacttctggacgaaggctacctgagttaccgatacatgtcgtacaaccataaccgacaatgttaaagccaagtgtatctaagtaagtttgcaaaccagaattacgtaggtaacctgtaaccaccttagaccctggagcaagtgatgttttaactgttggagctacgcgcaaaccacgttcaacagcatttttcgcaagcaaaccagctgacatcaagacgtaagggtttgaggtatttgtacatgatgtgatagctgcgatagccacgtgtcctgtttgaatctcaatatcttggtcatcaaaatgaacggttgcttttttattgatttcatcagctgtcaaaccaaagccttgaacaccagcttcacgaactaagctttcttggaaagtttgtttggcttgtgtcaaatcaatcaaatcttgtggacgttttggtccagaaatacttggtgaaattgttgataaatcaatttcaacgactttagtgtattctgcttgatgctctggatcgtagaaaagattattgtgtttgacatattcttttgttaaagcaatatggtcttctttacggtttgttaaacgcatataattaagcgtttcatcatcaattgggaaatagccgcaagttgcaccgtattctggtgccatattggcaatagttgcacgttcggcaaggctaagatttgataaaccgtcaccaaagtattcaacgaatttaccaacaactttttcttgacgaagaacttgtgtcactttaagggctaaatcggtagcggttgcaattttaggaagtttacctgtcaaacgaacaccgataacttctggaactgggaagaatgatgcttcaccaagcatcgctgcttctgcttcgatacctccgacaccccaaccaagaacaccaataccattaatcattgttgtatggctatcagtaccaaacattgaatctggataaagcatgccatttttttcaatgacaacatcactaaggaattcaatgttaacttggtgaatgataccagttgcaggtggcaccgcacggtagttatcaaatgatttttctgcccatttcaaaaattcataacgttcattgttacgtttaaattcaaggttaatattatcttctaaagctgtgtcacagccaaagaaatcaacttggacactgtggtcaataaccaaatcaactggaatttctggattaataagttcagcatctccaccgttggcaacaatggcatcacgcatcgacgcaaggtcaacaacaacaggaactcctgtgaaatcctgtaagatgacacgacttggtttgaatggaacttctccgcttgtttttttaggattgtaagttgctaaattttcaatgtgattttttgtaacatctacaccatcatactttctgagtaaactttcaagtaatatacgaatagtgtaagggattttcttgatatctcctccataatgagaaaccgcttcttcaagattaaaatacgaatactcaccatctttgaaggaaaactttgataaaaattctgtcatgtacagacccccgaaatataataatggttttttaattatacaactttcagaatatttagtcaagtataattcacaatcccatgttagattttataacataggatgtaatataaaactttagcatttctaaaaagcttgattttacaatattttgtgtgtgatattatttttaaatactatatattgtgttttttcgagagatatttcttgattttttgactaattttggttattctaaatgaacattgagtttcccataaggaaatattttttaggaggatgccctaatggctaataaaatcacaattttttcaaaaaataactgtatgcagtgcaaaatgacaaaaaaactcttggataaagagggagctgattaccaagaaatcaacattgacgaacgccctgatatgattgattacgtaaaagaccttggcttctctgctgcgccagtcgttaaagcaggtgacattattttttctggctttcaacctgcaaaattaaaagaaattatctaaaccttctatattaaattagaaaggagttaccacacttcaattaatgagcgttggtatcttactttatgagtctaaaaaatctcggcgatgtctcttattttcgccttaataatgaaattaaccgtcctgtgaatggacaaattcctcttaataaagataaagaagcccttagagctttctttcgtgaaaatgtcattccaaattcaatggcttttgacacgattattgataaaatcaactatttgatcgacaatgattatatcgagtcagaatttatcagcaaatatacgccagattttattgaaagtttggctaaggacttgcaagcgcaaggatttcgttttaaatctttcatggccgcctataagttttatcagcaatatgctttaaagacaaatgacggtaaatattatcttgaaagtatcgaagaccgtattctttttaacgctctttattttgctgatggtaatgaagaattggcacgtgatttggcaactgaaatgattcatcaacgctatcaacctgctacaccttcctttttaaatgctggtcgtagtcgccgtggtgaattcgtctcttgttttctcatttcagtaactgacgatatgaattcgattgggcgttctatcaattcagcgctacaattgtcccgtatcggtgggggtgttggtatcagcctttcaaatctacgtgaggctggcgctcctatcaagggttatgaaggggcagcttctggtgttgttcctgtcatgaagctctttgaagatagtttttcatattctaaccaactggggcaacgtcaaggagctggtgctgtttaccttgatgttttccacccagatatcatggcatttctatcaaccaaaaaagagaatgctgacgaaaaaatccgtgtcaaaactctctctcttggtatcaccgtacctgataaattttacgaattggctcgcaataacgaagagatgtatctctttagcccatatagtgttgagcgtgaatacggcgtgccttatagctatgttgatattacggctgaatatgacaaaatggttgctaacccaaatatcgtcaaaaccaaaattagagcacgtgatttggaaactgaaatttcgaaattacaacaagaatctggttacccttatgtggtcaatattgatacagctaatcgtaccaatccaattgacggtaaaattatcatgtcaaatctttgttcagaagtgcttcaggttcaaacccctagcgtgattaacgacgctcaagaatttgtcaaaatgggaactgatatttcatgtaatttgggctcaacaaatgtggttaatatgatgacttcacctgattttggacgttctatcaaagccatgacacgcgctttgacttttgtttcagacacctcatctattgaagctgtgccaacaatcaagcatggcaacgaacaagcgcatacctttggacttggtgctatgggccttcataccttcctagctcaacaccacattcattatggtagcccagaatccattgaatttaccaatatttactttatgttaatgaattattggactttggtggaatcaaatcatatcgctcgtgaacgtcagcaaacatttgtaggttttgaaaactcaaaatacgctgacggaagctactttgataaatacattacaggtgaatttattccaaaatctgaccgtgtgaaagaactctttgcagaacattttattccaagcggtgaggattgggctaagctccgcgatgctgtgatgacagacggactttaccaccaaaatcgtctagcagttgctccaaatggttctatttcttacattaatgatgtttctgcgtcgcttcacccgattacgcaacgtattgaggaacgtcaggaaaagaaaattggtaagatttattacccagctgctggtttatcgacagatactattccttattacacttctgcttatgatatggatatgcgaaaagtcattgatgtttatgcggcagcgactgaacacgttgaccaaggattgtcactaacgctctttttgcgcagcgatattccgcaaggcctctatgaatggaaaacgcaaagcaaacaaaccactcgtgacctgtctatcctgcgccattacgcctttaataaaggcattaaatcaatctactacatccgtacctttaccgatgacggtgatgaagtcggctcaaaccaatgcgaaagctgcgtgatttaactgaacacttgttattggtcctaaaggacctaataacaagacggcaaccgctatggcggtttgcctagttcacttactaacttcaccaaatgactattatcgagtcatttggtttcgtgtcgtaacttatcgaacacttggatttgtctctgcagaacccagtaacaagacggtaaacgctatggcggtttgcctagttcacttactaacttcaccaaatgactattatcgagtcatttggtttcgtggcgtaacttatcgaacacttggatttgtctctgcagaacccagtaacaagacaacaaacgttatagcgaaatggctaactcacttacaactccattaatcggctagtatcgagtcgattaattacgtggcgtaactttgatttgtgtactgttaaacatgaacaagacaatattcactttaacaaatcggcttgcttattgacacgttgcagtaaacggctgttagtaattcatgattagaaaacttgtccttgttctacaaaaactaaaatcaaagcagtaactactttcgcttaggaattcaaaaagatgttagcattggggtaactttcactcttggcaaaataccttgctcttgctaggttagcttactccatggaaaaaaacaatcttaaaaatttaaatactatttctgaaatcccagtcgtttggctggctttcttaatcacttttaggagaatataaatgtcacaaacttattatgaagccattaattggaatgagattgaagacatcattgataaatcaacttgggaaaagttgacggagcaattttggcttgatacacgtattccgttatcaaatgaccttgatgattggcgtaaattgtcagccggggaaaaagaccttgtcggaaaagtctttggcggattaactttgctagataccatgcaatctgaatctggcgtcgaagcgattcgtgcggacgttagaaccccccatgaggaagctgttctgaataacattcaattcatggagtcagttcatgccaaatcttattcctctattttttcaacgcttaacacaaaatctgaaattgaagccatttttgaatggacaaatagcaatgactacctgcaaaaaaaggcaaaaatcatcaatgatatttatgaaaatgggaatgcgttgcaaaagaaagttgcctctactttcctagaaactttcctcttctattcaggatttttcacaccactttattatcttggcaataataaattggcaaacgttgctgaaattatcaaattgattatccgtgatgaatctgttcacggcacttacattggctataaattccaacttggtttcaatgaattatctgaagaagaacaagacaattttcgtgagtggatgtatgatttactttatcaactttacgaaaatgaggaaaattataccaaatcgctgtatgacggtgttggttggactgatgaagtattgacattcttgcgctacaacgccaataaagccctgatgaatctggggcaagatccacttttcccagatactgctaacgacgttaaccctattgtcatgaacggtatttcaacaggaacgtctaatcacgatttctttagtcaggttggaaatggttatctccttggttctgttgaagccatgcaagatgatgattacaattatggtctctagtctgagccaattttgaaaatgtgtgataattttcaaaaaagtatgaaaactaagcttgacaagaaactttctttcatgctagactataagcaattagattcacaaaggagtgcctctggctgagatcgcatttgcgaaatcctgataacctgatctcgttagtacgagcgtagggattgtgacatgaccgttttaaactttgttttgaatatcattgcacatattatcagaaaaataagctcctttgtatcaaaaggagcttttatttatgtcatcaaaaaattctcaactgtctgctttgattgaaacagctttagtagctgctttagccatggctttatcttacattccagattttgcaagctggttcacaccgtcgtttggagctattcccttggtcctctttgcactacgtcgtggcacaaaatatggcgtattggctgggctgatttggggcttactacattttatccttggtaaagtgtggtatttagccttatcacaagtgcttatcgaatacatcgttgcctttgtttccatgggcttagctggtatttttactgttccttttcaaaatgctcttgccaaggacaataaaggacgtgctttattttacgcgacaggtggtgctatcttagctgtctttgtccgctatttttggcatttcgtcgctggctttattttctggggaagttacgcgccaaaaggaatgtcgccttattggtattcattcaccgttaacggaacagctgggctgttaaccttgattttcgttattttagcgctagctattatcattccgacacaaggaaaacttttcttagttaagagataaaacaaaaaaacacgtttgtagcgtgttttttaaattgaccttgggacaacgatgacaacggcggtaaagagcacagcccacatcatggcttgtggaaaaacggtcatgctcaatagcataccaataacttttatagcaatatcccaacgcatccaattattatggcttcttgcagctgcttctgcttcatttgtggtagcaacattggttaattctgaatacatccaaacattagtgaaagaaacgagcataacaatagcaccatagacaatttgtgctactgaactgttaaaatcactagccactaaagaggttgtgtaagggaaaaatgatgagaaaaacaacaaaagcatggaaatccaaaccaagcggttattgactttttcaacattgtcccaagctctgtgcatattgacccacattgttcccagccagaaaaaggaaatggtataggcaaaaaagttggtttttaactcccacaaggctgaccatgttaattctgatggacgttctaattccaaaaccaaaatggtcataatgatagccagaacagcatccgtaaaggcaaccaaccgctcttttgacatttcagacataaattttctccctttatattaagattttcggtatatcatataacgtaaaagtgccacaatgagaagccaaaggacaatacaaatcacaataatagttacccaagcgtgtttatcatttatccatggcaaaggcacattcattccgaaaaatccagtaataactgcaaatactgctaaaacaactgatataatcgtcaatgttgtcatattatcatttagattattgttcaaaatgttgttgtagcttcctgataattgttgtaggacttgcgcattgacctgtgtcatgctggataattggcgtgcttcaatcagcgaatcttccaattgctctttttcaatattatttagttgcttataaaaagcttgacctttaagttgttcaagaagaatgacgttttgattagaggcagaaacgaggtaaaccattcctgtttcaatatcagaaagccctagcaaatctttcttggtggtccgttgacgtaaacgacgatttaattgactggtgcttttatccatttcttccaaatatgggaaatacgcttccgcaatgagaaacaagctcataaaaaggaatttataaatggaaacatcaggacgtctttgtaaataatgtcgcattaaatcaacaatgtaggcattatctgaattaaaaatcgttattaactggtcaccccgaacgacaaaagttatcggaattgtctcgtaatgattatcttctttggttcgatttagcacattgtaaatgataatcatggtttcggtttgccaatcatactccatatgcgcacgttcatttctatccaaggcataagaaatcaattcttcatcaatgccatattcagcatacaaattagatgtttgactaatcttatcagaatcaattgccacccaagtcaaacggtcgcctaacatttcttttgtaattaccatagcagcccacctttcttcttaaattccttcatcattataacattttttcaaaatgaggtggcggcaaaagccttgtggtaaaggaaaaagccatagtaatatgacttttcttgattaatactaaatatagctgataactgtgacaaattttgagaatgagcacagcttatcatttttggggtgagtcgcagttaagattttctttaatacgacttcaactacaacacttcttcgttattttaaaacgattttccgacaaaacccgctaggagttcaaatgttgcggcttcgtggtggtctgcaaagacagttgtattcgtattgagtgttttgatttgtgccatgtcgtcgtcagataattcgaagtcaaaaatatcaaaattttggcggacacgttctggtttggctgattttgataagctaacgataccacgttgtaattgccagcgaagcatcacttgtgctgttgttttgccgtatttatcagcgatagcttttagaacagggttgttaaagacatcaaatcgtccttcagcaaaagcaccccagctttcaacttgaacacctttagacgcttggtaagcaacagaatcatctttttgattaaagacatgaagttcaatctgatttacagcaggaatgacatcattgaaaatagcaaggttagctaattggtcatcttcgaaatttgatacgccaatggcacgaatttttccgtctttgtaaagttcttccagcgcacgccatgccccaaaagtatcgcccacgggttggtgaagcaaataaaggtcgatgtaatcagtatcaagtttgcgcagcgattcttcaaaagcctccttggcaccttcgtaattaatgtgttgaatgaaagcttttgttgtgataaagagttcttcacgcggaacacctgaagctttgatagctttgccgacggcttcttcgttgccataagcttctgcggtgtcgattaaacggtagcctgttttgatggcttcttcgacaactttttgacaaacatctgggtcaggaatttggaaaacaccaaagccgaccatgggcattttaacgccgttattaagtgttattgtaggttgttgaatcattatttttttctcctttggttaatcattttcttgatgattttattataaaatgctattgcttcttttaaaattacttcttttctatgctagtatgcagttggcgtataattgtttttaaataaaaaaacagctccgctagggagctgaaaaagccattaatcattagcatgaacatcatagttagaaagtagccattctccaacacctggtgcgtctggatcatgagcaccttttcctttgtcaagggcacgaagctctgccatttcttcagcggtcaattcaaaatcaaagagttctttgtttgatgccatgcgaactttcttggttgattttggcaagacaatgataccttcttgcacttcaaatcgcaaaataatttgcccagcatctttgccatatttgttagccaaggctgtgatgattggttcagcaaataagtctttatttccttgtccgagtggtgcccaagcttcgattttaacatcatcctttgcaagcaagtcacgtagagctttttgttggaaataggggttgaactctacttggttaacagctggaatcgtattgaaatgtggaacaaattgattccaaaagtttggcgtgaagtttgacacaccgattgatttgattttaccagctgctttggcttcttctagagctttccaagcttcttcgactttgccataaggttggtgaagcaggtagaggtcaaggtaatcaagccccattttttccaaggttacatcaatggttgctttagcagtttcgtaagcataatcttgaatccaaagtttactagtgacaaagatttcatcacgtggaatgcctgaatctttgatagcttgtccgacttctttttcgttaaaataagcttgcgctgtgtcaatatgacgataaccaacttctaaggcttccttaacagctgtataggtcgaaccgtctgcaggaatttggaaaacaccaaacccaactgctggaatacgattgccatcatttaaagtaattgtttctgtcattatttttacctcgttcttttttatgcctacattttacgtctaaatggctcaaaagtacattacttatgtgctaagctagtatgcgttttacgtatactggtttagtgttactttttatttgaaaatagctcagcttctgtggtagcatacttgtaacgtatgataatcagaaaggagagtattcatgattgatgactacctcttagaagccctcgttgcttttgccaaatatggtacgctctctgccacagcagaacatctcatggtcactcagccaacggtcacacgaggcatgcaaaaactcgaaaacgaactcggagtaactttattcaaacgaactcctaatcgcattagcttaacggaaacaggtcaattagctgccaaagaagctgaaaaattactagaagccaagcaagcctttatcaagcatatccaagattttgagaaacattcaggaaaaatacgattaggttcggtagctcctggtccgctttacattgccgaagatgtggcatccgagcatattagcattgataatgatttactttctgaaaatgaagttattgctaaattgctttctcaagattatcagctcattttcacgcaccaagaaattcaaactgatgacatcgaatcactttatgtcggcacggaaagtttacgtgttaacagtgatgccatggttgtcccagctaataaaacagaaataacgtttcaagaaatggctggttttagttttgtggttcttcgcgacattggtatttggcaacaaattatcgaggacaatattccaaatgcgaaattcatttaccaagatgaagttgatgatttcaatgaaattaggcgctattcgagtctaccttatttcactaccaacattacgcagctcacgcgcgaaaggcaagtccacaatcgccgtttagaaatgccaattaccgacgaaacagcacagattgatttttaccttgcctatctgaaaacgaacaaatcacagttcaaagaggaaattgccgccattcaaactgcttgggcaaatttgaaatgagaatgacgaaatctataaaaacaaagcaggtactaaccattggtaagatatattttggtatagtgtaaaaaacttattgtttctttttaactagctatagtcataaaaacggtctgatacgccaaattatcgtatgaggaagaggttaacctgtatactaaattcactctcacagtggagattctatttatcagataatttgatgtaaacaataaaaagacagctttcgaaaagccgtctctccacattaaaaatgttatttctatatgtttaatttacgaattctcattcacataatcaacaatatcttgtacttgctcatcgtattccgacaatgtaggatagtcattttcttcaagatagtcgtctaaagtatcagagttatttcctgtttcaatatttcctgttgcttcggtaatgacatatgttcctgatgattgataaacaatatttgttcctgatgccaagacaattgcatacgaaccatcagaggcttttgaaatattgctaccgtctgattcaatgataacataactctcgtctgtattatacgtgataagcgttccgtctgatagagttacctcaaaagcaccaccatctccaactgtaatctgacttccgtctgaataagttacaaatcctccacctgtcgtctctgatgaactacttgcagaagaagatgaatttgatgacgttgatacatttgatgaacttgatgtatttgtagattcttgattattattactacaagcagttagaaataaaacgctcgttgcggctaaagctaaataggttactgtttttttcataaaattctccctttgaaagttcctctgatttcatactttgaacagtagaaaacaacctatgtgacatttttaatgtgacagaaaaaacataactgtttaatcttggctatcagtatagtcaatttttaagcagtaggcaatgacttttcaatacttttaaaatttgaaacagaaaaaatatttgcttcgattttctgtaaatttactaaatcaattaagaaaaacagtccaatagtctagttaacttatatactctaacctatatctaaggtaaaaacaaggctgagcgttcttgctcagctttttgctatctatcacgtttggtttagagttgttttgctaggttaatcatttcaagcacaccttgtgcgcattcgctgcccttatttcctgcttttgagcctgaacgttcgatggcttgttcaatatcttctgtcgtaatcacgccaaacatgactggaatgtcgcttgtgagattgatttgtccgataccttttgccacttcattacaaacaaggtcgtaatggctggttgacccacgaataacgctaccaagtgtgataacaccgtcgtattttccacttgcaacgatttttttcgtcataaaaggaatttcaaaagcacctggaacccagtaaacatcaatagcttctttagctacttcattacgaatcaagccgtccattgctccgcctaataattttgaggtaataaattcattaaagcgtgcaacgacgatagcaattttgacatcttttccgataaattttccttcaaatgttgtcatgattttcctccttaaacgatgtgtaataaatgatgaaatttttcttgtttggtttgcaagtaagcacgattttcaacgtgcgctggaatttgtaacggtaagcgttcgacaatctcgataccagatttttcaagctgttctagcttgtcaggattgttagtcaacagcttaatttgtttaatgttcaaaaaagacaagatgtctgctgcaatctggtaatcacgctcatctggcgcaaaaccaagctcaagattggcatcataggtatcaaatcctttttcttgcagctgataagatttgagcttatttttaagcccaatgccacgtccttcttggcgaaggtataaaatcgctccgcatccaaccttatcaattttcttcatcgctgcgtgcagctgctcaccacaatcacaacgtaaagagccaaaaacatcacctgtcaaacattccgaatgcaaacgaactaacagtggttcatcagacgtcaggtcaccttttgataacaagaggtgctcacgttttttctcatcttcaaacaagcgaagctcaaaatcaccataagccgacggtaacgttacctttgggctatcttgaaagctcacataacgtgcgatatctcccacttcaatcatggtcaaatgccatttctgtgcaaattcatgcaaatcagccttccgcgccatggtgccatcatcttttaaaatttcgcaaatataagctgcttctgtgctaccagccaaacgtgctaaatcaagactagcttccgtatgcccacgccgttgcaaaacaccgccgcttcgtccaaccaaaggaaacatatgcccaggtcggtgaaaatcactagctttactagccttagcagccaaggtttgaatggtcttagcacggtcaaaggctgaaatacctgttgaggtttctttatggtccacgctgatagtaaaggcggtgccatgcgcatcagtattttctgctgacataggaacaagttccaaacgctcagcaatgcttttagatactggtgcacaaatcaaaccacgcgcatgcttggtcataaagttcacattgtcagcgctagccaattcggctaaaccaaccaaatctccttctgcttcgcggtcatcatcatcaaccaccacgattaattttcctgctttcaaatcagcaagagctttttcgacatccttaaacatttattgtcctcccatttttgcaacttgtgcttgcatgtacttggctaaaatatctgtctcgatattgaccttatcgccttttttgagtcgagccaagttagtttctttcgccgtatgcggaatcagcgacacgctaaattgcccagacgtcaccgacaccaccgtcagactaaccccattgactgcgattgagccctgccccacgatttgccctgcaagttcttgagaaatagcaaagctgagcacaatagcattttcatcgctgtgtttttggatgagagttgcgacactatcaacgtgccccgtcacaaggtgcccttcaaaacgtgcattagcagccatagccagctcaagattcaccaaatcaccgatacgacattctgaaaaaatagtgcgcttaaaagtctctggcataatatccaccgtaaacgtatcacctgttttagccacacaagtcagacaaacaccgttgattgccatactatcaccgattttgtaatccgctaataattttcgtgaagctttgcaagttaatttgatactgtgttgctgtttgacgattcggctgatacgcccttgttcttgaattaatcctgtaaacatcacaacctccttttgactgacaaacgcagattagtgccaattgtttgaactgaaaaatcctgcaaatcgtaaacttgttcaacctgacgagaacttgctatagcagctctgccattgccaccaatcaccttaggggtcacgtaagaaatgaactcatcccataaatcgctcgctaaaaacgcatcatgaacctgcgctccgccctcgacataaacagactgaatctttttctcataaagcgcctgcaaaatcttagcaatggaaaaatcagataaggctatgaccgtgatattcgcaggcaaatttgcaacttgtcgcctactgaaaatgtaaactggcgctgattgatttttaaaaatttgtagctctcgtttgtcaaaaatgcgccctgtttcgtccaaaatcacgcgtactggcggatacaaactcctcccagcgccaaataattgtgggttatcaatcaaaaccgtgtcagcaccaaccaaaatggcttggtaatcatctcgctcatcatgaacaaaacggttggtttcatcatcggtcaaggcagttcgtttgccaagtaccgcaattttcccatccaagctcaccgcttgtttcaaaaccacgtaagggcgcttgtgttcatggtaaaaattataatgcggattaagtgcgcgtgcctcattctccaaaacttgtgtgacgacctcaattccttgacttttcaagaattctaaaccttttccagcaactaaaggattagggtcaagttgtccaacaacgacctttttaatgccagcttcaacaatcgcctgcgtacacggcggctgcttcccagtatgatgacagggttccaaagtcacataaagggttgaattggctagttcttcaggggcttcacaatgcaaaatcgcatttttctcagcatgctcgtgaccatactgcaaatgcgcaccgcgagcaatcacacgaccatttttaacgataaccgcaccaactaagggattggtataggtctgcctaaagccttttttagcttctgcaattgcctgtgccatatagttttcgtgcataaaagcctcctttctagcaaaaaaatcccaatgaaaacaagcttagcgaccttagccaaagcaatttcatcgggataattcatttttaccgttgcatcaagcaacaccaaaaaacaataattgtaatcaaaaacctcgtagcaatacactacgaggcaatcaaagacaactaaaaaagtattccaaaaagcaagagacttgccctttgacactctatcaatttcttctcccatccagactatactgtcggttctggaatcgcaccagatcagcttgcgctcacggacttatctttgctcatttgattatcaaacaaagttgattgatgatttgcttttagtctaggcgacacctcgcagacataactggtgttaggcaagaggcgtcaacaacgaataaaagcaaatagcaatcaaggacaaagaatcaccgtcggtcgggaatcacaccccaccccgaagaaaactattcaattcttttttagattagcacgatttaaaaacgctgtcaatcatttttcttattttctgaaatatttattaacgaagcgaatgttcgcaagattaatatagagatagattgctgtcgttacgaccaaacctgaagtgacatcaatagaacttactattgctaaaatgtacagaaccacataagcaattggtaaaaattgattcagattgaaaacaattaagaaagcttgttcataatttgcttgaagttcaccctcatcgtaagaataagcaaattctttcacttctttaattgttggaaaagctgacaatttataatggcgaattttctgagttaatttaaatatcgctgcttgaaaaatgaatagcaaagctagaaaaattatatccattacatacgttccaagactaagtgattcatcgctaagaattttatcttgaaagtcataaagacctccaaataaagaaaaaagaattaaagccattgaaacattataaaaaatacgtgcaaattctaaatttttaaacgtcttgcgataaacctcataactatcatcttcgtcagtatcattacccaagctttcataacgatcatggtaatgatttgcttgatacataaaccataatgtaacaacaattgaaatagcagtaagtccataagccaaaatcataaaagtggcaaacttgaacgttaaaatattctcattaaaatcgatacttaagtaaccagcaagagcacctacaagtaaacccaccacagcaattccgagatagattaaaatacgttgttttgttgtccaccttcttgtttctttcatcctttttccccctcctcatcaagactaaaaacattttcgacaggttcattgaatatgtgtgcaatgcgcagagcgataatcaccgacggtgtgtattcattgcgttctaggagactgattgtttgcctagaaaccttggctaatttcgccagttgagtttgatttaacccatcacgcgcacgcaattctttaagacgattttttaagaccaaattatcctccgttctagtaactaacaaaagttgcttcctttttagaaattgtttttttaacaattccttcctcctaggatttggagtttctgatgttaaataagcaccaaaaatagcaagaaaagtaagaagccaatttttatccaacatataatctcctcccttttgttgatttgattataacatcgttttttatttttgacaaatatctttgtcaaaaataaaaaaatatttgtcaaatagcatataattcttgtcaactaaaaagcccgtgataggttatcaacggacttctcgttttataaaattatgtttgctaaaaggcaattgcgttttatttcaactacttcattcatactggcaattatgccattttggtcagaatcacgccgataaacatgataacgagtcctagtaatttttggcgtgatactggcgattttagcgcatggaaaaagccgaattggtcaatgattgcactaaaagtcaattgaccaaacaaagccataaccacgacttgtccagttccaatttgtggaactaaccaagcagaaccaaacacataaagcccgcctaaaaatccaccaatccatatccaccagtatgattttccagcagaaacggctttacccaagtcagcaaatgtcgtttgagttcccaaacaataaacgagcaagatgattgttcctgtactaaaagaaattgctgctgcttgcaaagaagaacccaaaattgttcccaaatacccattaactgcggtttgtgttgcgctcaacatcccagctaacacgccaatcatctgccataaaagtacagacttttgtttattttcacgtgatgactgtttacgaatcaccgtcaacaaaacccctataagaaccaaaacaaaacctagtaaacgtggaacggtcaaaggattcaaaggtgaactcaacaaaccaaactggtcaatcaaaagccccatgatgatttgaccaaaaatcggtagaaccgccgtctgaacaccaccaagttttggaaaaagtaaaatattaactgtcaaaacaattgacccaagtaaaccacccgtccatatccaccacggattatcactaaaggtagctgtcgtaaaatgaacactgccttgcgtgaaaaaagctagcgctaacaaaaatagtgctccaacgctaaacgaaaccgttgaagctaaaaatggcgagccaacaaagctacgcaatctcgaatttactgcggtttgcgttgccaataaacctcccgttacaatgggaatcaatgataacaaaatcataatatcctccttggactgtattttcctttgttaagaaaggcatataaaaatattatattacttctaggctactccatgtcaagcattttttagaaatttcctaaatcaatagcagattgtccgctatctaacaaggcttggtattcatcataggtggcagtacacacatgattagtcgctccgtcaatatgaatcttctctgttcctgcttctatcgctgttttgtagtaccattttttaaaacgcaaatacgccaaagattgttccaaatcagcaattttttgctctaaaattttctcatgtttatcaagaaaatcatatcgttcaccaagcgaatcgtctccgtctaagcgccacgaaacaaaatgagcaatttctttcacaggtacgccagcatgttttaaatccataatcatacgcatcaactgaatattgtcatgggtaaacacacgacgcccacctttatcacgttttacaaacggtaaaagcccttctttatcgtaataacgaatcgtatcaatcgttatccccaacatttctgaaacttcaccaatagtatatgtttgcataatttttcctctctttgtttagtagtatagcgcaattttgaaaaagaagaaaatctttgaccaaacgatcaaagatttaacatggtaacaatcctaaattcaatagttagccttgaaaagcaaaacctagcttaatccaatgtttccaaaactttttgtgccaatgaacgtactgattgtgggttttgtcctgtgattaaacgtccgtcagcaacaacaaagtcagaaaatggtgttgatgattggtaaagagcaccagctgcttttaaagcatcttcggcaaggaaaggcacttctttagttgttccgttagcttcttcttcagcattgctaaatccagttaattgtttgccagctacaaatgatgttcctttgtcatctttaagtgccaaaagtccagcaactccgtgacaaactgctgaaatgataccaccattgtcataaatttgacgagctaattcagcaatttcttcagattttggaaaatcccaaacggttccgtgtccacctgcataataaatgaaatcgtaatctttagcattcaattcacttggtttatgtgtattggcaagagcatttttacggaattctgaatctgtataatatttccagtcagtagcatccatagataaaagactaggtggatcaagtggaatgtagccaccattcggactgacgaaatctgtttcgacaccattttcaacaaggacatcataaaaatgagttagttcactaagccagagaccagttgcacggtcaagtggatcatatttttcaacgtttgttaatacaataactgcttttgtcatattttttctctctttctttactgttttggagcttgtgtgattggttttcctagattttcttgcatgtaacgatacatgaacggattaatgccgacctcacgcgctgctgcttcatcaggcatggtgtagcgaatcctatcttcttgaccagcttcaactttagccacccattgaggttcacgtaaatattgcataccaagtgcgacaaattctgcgcctgtttccttagcctcttgtgcttcttgcggcgtactaatgccaccaacgataatcaatggcttgcgctgattaatcgtggcaagaacttgtttaaccacattatcgctaccagctggttcatcatttggcacatcccaaacatcatcttgtgataaatgcaggtaatcaatttccgcatcagctagctgattaacgaaagccagagtatctttcaaatgaaatcctttttcgcctttttcttgtggtgaaaaacgataaccaagtaagaattgactagcaccagcttctttaattgccttacggcaagcctcaataatcgccaaaccaaagcgtgaacgctcttgcccccatttatctgtgcgttgatttgattttaccgaaaagaattgatgaatcaagtaatgattagcgccgtgaatttcgacaccatcaaaaccagcttgaatagctcggcgagtcgcctcaccaaatgccttgataatgtcctcaacttcttcaccagtcaattcacgcggcgtttgtgaccctgggataccagaagcaatcgcactagcaccttccaagttctctggtgctacaaatgcacgacgcccagcatgaaaaatttgtaaaatagctaagctaccaccttttttcattgcttgtgccatttctgacagacgtgacaaatacttgtcatctgtgattgacaattgccccgcaaagccttttccattttctgtcacataagcaactggtgaaatgaaaatccccgcatcacctgctcgcttggcaaaaaaattaagttcatcttgcgaaactgttccgtcatacaaagcagaaccttctgtcatcggcggaatcacaatacgatttttagccgtgacaccatttttaaaggtataaggctctaaaaatgtataagtcatgataaactccttttctatgtaagtaaggtcaaaaaagcgctaaaagtgcatttctgaaacccttgatttctttaatgaaaccattatacaagctggagggcactcgaggtcaaggatttaacacaaaaaaatcattccaatgagatttttcctcatttagccaccaaaatataacaaatcccatcgcaaaaaagcctgaaatcaaacgacttcagacttctgtgtaatgataaaatgttttgaatgactgcaatgtgtaaaaagcgaaagattacaaaccattcaccaacgccaccaatttttgggcatgttcttgtgattttgcaaccatttcttgtgctttgttagcgtcctcgcgaagtgagtaagaaacaccatgtgtgacaatgtgacctgcatagtttaactgtgttaatttcgctgtcaaacgaattggtgccaaaaggtcgtcaatcgtcgtgcctgattctgcactataagccgcttctcctgctccagttgtcaaagaagccaccaaatattttcctttcaaagcatcaccagttgaaccatgtgaaaagccgtgaacaaagactttttcaatccatttattaagtaaagacggtgtcatataccagtacaatgggtattggaaaataatcacatcagcctttcgcaatttatcctgctctgctgccacatcaatctgataatcaggatacaaatcactcaaaatgtccaattccacctctggcaaagctttcttcacttcttccaaaatcgttttattggctaaagaatcatttttcaaatcgggatgccctgcaacaattaaaatattttttgacatatttttacctcattttattattcatgctattattctagacctttaccatctaatcgcgcattcaccagaccaatcgtcaccataaaagcataaacagtaacggaacctgtaaaagaaaagccatgttcttttagctgtttggcaatggcatcactttctggagttgttggggaaagctcacttattctttgaatcgttaaatgtttctgtttatggttaactaaagtccaaagaaattcatcaaaactaccgtagattttctgaatcgcttgtacagctttggcattttttatcgttgcttcaatttttcgacgattgtgaatgataccatccattgccatcaaatcatcaacatccttatccgtcatctttgcaatagaatcaatatcccaatgatgaaaagcttctgctaaacgaggccgtttaataaaagaagcatgccaatttaatccagctgcaaacacacctattgtcaataattcaaaaatatgacaatcatcatgcgatggaatcccccattcttcctccatataacgacgatagagaggatgatcaggataatacctttgataaaggatatcatctggaaaccactttgttaacatgattcattactccttctaacaaacaaaatagtaattccttaaaagcttgtaaatactgtatgtatcaactaaagaattactattaatctgttagatagtgtacaaaaccttattatttttgtcaaccgacatagaaagttttataattttgataatttttaactcacgcaaaaacctctgccaaaatggctacgccttggtctatttcttccttcgttaaggtcaatggtggcaagagacgaataacatttgttcctgctgtcaagacaatcaagcctttatcacgtgctttttcgaccaattcggcaagattttcagtcgtttcaatcccaatcatgtaaccaagaccacgaacatcagtcacttttgcattaccagccaaaactttcttcaattcagcttgcaagtaatttccattgtcaaacgcttgtggcaagaaaccgtcagccaacataatatcgagtacgcttgaggctgctgacatgacaagtttattgccaccaaaggttgaaccatggctaccgtaagagaaagcaaaaccaagtttttccttggctaacatggcaccgactggtacaccatttccaagaccttttgccaaagtgaaaatatcaggctcaatgccataatgttcaaatgagaacaatttaccagtacgtcccataccagtttgcacctcatcaacaatcagcaaaatacctgtttcttggcaaaatgcgcttaatgctgtcacaaaatctttgtcagctggacgaacacctgattccccttgaaccaattccaacataatagcggcagtatcatcggtcaccaagcttttcacgctatctaaatcattgtaaatcgcatagctaaaatgtggcactacatcaccaaaaccatccttgattttgtcttgcccagttgcggacattgacccaaaagtacgaccatggaaagaattaacaaaagtaatgatttcttgcttgccagtcgccttacgtgcaattttaatagcagcttcattggcttcagcaccgctattggcaaagaaagcaagataatctttatccccaatcaacttacctgccacttcttcttgcaaagaattaaggtacaagtttggtgtgtgccaaatttcttcagcttgtttttgcaaggcagcttttacttctgggtgaaaaccaagatttgttacaccgattcctgttgaaaaatcaaggtatttcttgccgtcttggtcaaaaaggtaatttccttctgccttaacaaattcaacggctgcgcgtttataattttgaaataattttgtcattgttatcttccctttcatgctagagttagcagatgattgaagttcctgttaccagattgtcgccaatcaatacctcaccaacacctgctaaaacggtatttaccgccgattcaatcttaggaatcatgcctcctgtgataattccttggtcaatcttatcttgaaattctgtcgaagaaaggctatcgagcatcgcaccattttccaaaacacctttaacatcagtcatcaagactaatttttcagcgccgagggcaacggcaacggctgtcgcaagataatccgcattgatatttagcatatcaccatctttagaatagccaattgaggcaaggacaggcagcatttgattcaccaacattttttccaagatttccgtctgaatttgtgaaacattgccaacataaccgtaagtttcttggtctaagaaatcagcctgaacgactttttcaatatcagacaagagttgaatactatcaatagatgactggttaagttttttaaccaaattttctccaacgatatttaacaaggcatagctaacaagcttcatgtcagattggcttgtcacacgcagaccgttgattttcttaacaggcacgtgctcttcttccattaatttgttaatcgcaaagccgccaccatgaacgataaccagctgcttgcctgcttctttccattttttgatttgattaataaagtcttgcgaaaggtgctgactagcaacacctccgattttaatcacaataatattttccatatgtttcttctctttatgtgcgataaagggcgttgattttcacgtagtcgtatgataaatcacagccccaagcttttcctactgcttcaccagaatgcaaatcaaccgtaatcgtaatctcatcctcgtgcataatatcttgcatttcctcagcttcaaagtcaactggacttgattttagcatgacaggaatgtcaccgaggtaaatgtcaatgttgtcaactggaacatcaacacctgcatagccaaccgctgctaaaatacgtccccagttagggtcctctccaaaaatcgctgttttaacaagacttgaaccaacgacactttttgccatcatacgagcatcaagggcattgggtgcattcttgacattgacttcaatgagtttgcttgccccttcgccatctttagcgattttcttagccaattcctgcatgacataattgagcattgctgagaacttatcaaattctggtgtatctggcaagatttcttcattcaatgtacaaccatttgacaacactaagaccatgtcatttgttgatgtatcaccgtcaaccgtaatttggttaaatgttgtttcaacattttggcttagcgcaagctgcaaggtttcacttgaaatattcgcatcacaagtgataaaagcaagcatggttgccatatttggatgaatcattcctgagcctttcgctacaccagccatgatcacttcatcacgaccaaatttttctgtgacagcaacggttttaaccatagtatctgttgttaagatagctttcgagaaatcatcagaattaccattaacaacaagcttagaaagcccagttttaagagtatccattggcaacaaatcaccaataacacccgttgaagcaatcccgaccaaatcaggctcaacacctaatttttcagctgtccatttttgcatagtataggcatcttccattccttgcacgcccgtacaagaatttgccactcctgaattcacaacgattgctttcatcttttgcgcttttttaatggaatttcgtgtcacaatcaatggcgcagcaatgactttatttgtcgtgtaaacacctgctacactagcgggaacttctgaaacaatccaaccaaaatcaagttttcttttcttaaatcctgcatgcaaaccgtctgccgaaaaaccaagagggctcgcaacatttccttcaatcactttcatcttcttatacctgtaacacgtaaggaactcatacttcccaataaccttctgtgctacttcctttctatttctataaataattcggtgaaatcaacaaaccttctgtttcgttccaaccattcatcaaattcagattttgcacggcttgaccagcagcgcctttaatcaaattatcgataacagatacgaccgtcagcacatttgtgacatcattgtaaacaaaaccaatatctgtaaagtttgaaccgataacattgtgcaattctggcaaatcatcttggatgcgaacaaaagttttatccttgtaagcatccttgtaaatggcgtataattccgcttcgctcaatgtttttttcaatttaacataagaagtcgccataatcccacggttaactggcaacaatgatgtcgaaaactgaatgtggtgtaacttcttgctaaataattgcaattcctgcacaatttcaggaatatgctgatgacggtttaatttgtaagtcacgtagttatcatgcacattgacaaagtgacttgattctgataaagctttaccagcccccgtcaaaccactttttgcatcaacgatgatagaatcttcttcagccacaccagcttttagcaatggaatcaaggctaattctgttgctgtcgcatagcaaccagggtttgaaatgaatttcttacctttgacatctgtaaattctgccaaagcatatgtaaatttattcaacacatcatcactagctggtgtttttttataccatttttcataagaatcagctggcaaacgatggtcgcctgacaaatcaatcactgggaaatcagcttcaacaaatgactgcgctaactggctagccaccccacttggtgtcgcaaaaaaaaccaaatctgattttgccatgatttcttgagcattaaatgcctcaataactaagtcacaaacaccaacaaggtaagggtataactctgacaatcgtcggccgatttccttagttgcatgaatcgaagcaatcgtaacatttttatgattattcaataatttaactaattcgagaccactatatccagtgataccaacaattgacactttcataatatacactccttgaataaatatgtattcaattttatagtatatttattcataagtcaagtgttttttgcataaaaaacaaaaaaaagcataaattttcacttatgctttcactatttttcaaataatttcagtttgctaatcaatttttcgatttttcttataagcaaaataaagcgctattgaagtcaagaaaatccaaataagtaaaacaaccattgtttggtcagtcaattgataactagataattccttaaaatatttggcatttgcaccaataaaagaataatgcatgaatttgttaacagatttaataaattctgaaaaaagaggaagaaaacttgcgataataactaatgtaagactagaaactgttgtttcggtttgatttttagctaaaaatgcaattaaaagattcaacaacacaaaaataagattagttaagctcacaactactaaaaattttccccaatccatatcttggatttgcattataattgggattaaaatactagaaatcaaggaaaaaaggagtggaaaaacaacaactgataaaatgtactctccctgccttactcctgataaaatcaaggcttttaaatttttcttttctttttcctctgaaatcatggtcgaggcaaaggtacctgctgtgtaactataaactaaattaattcccgttccgataagcgaagcattgatttctggatttcccaaagcagcaaatatcgccatgtaaagaattggcgagaaaaccgtaaaaagaaaaagtttattacttaatataaactgccaacgtaaccaaagtaaactcataaatctattccccatgccatttttctcctgtcaatttaataaaaatagtttccaaatcaggttctgctgtatgcatactgacaacattaggattaaggtaattggcaacctcatctcttgaaataactttttcctcaccatttttatagagaagatgaacattatcgtcaacacgatacttttcaataatctcttctggacttccatattccaaaattttacctttatttaataaagataatttatcacacaatttagttgcttcttgcatattatgagttgtcaaaaaaatagaaatgcccttattcttcaattccaacaataactgatgtactttttgtgataatgttggatccatgccagaagttggctcatctaagaaaataatctcaggatcgtgtaaaattgcacgaatgagtaataatcgttggcgcataccagtagaaatttttttcgcttttttattacgatcttcatataaatctagacgcttcaacaaatcatccactttactcatcggaagattgtgaaaacgtgcaaaaaattctaaattcttatatacagtcatattttcgtaaaaacctacggtatcactcataattcccatttttaaataatcatcaggagttaattgttcaggctttttaccaagaatttcaacctctccactatcttgttttaactgattcgttaaaatattaatagttgttgttttaccagcacccgaaggtcctaaaaaaccaaaaatttccccttcattaacacaaaaggatacctcgtctaaagccacagtatctttaaaacttttagacaaattttgtacatttatcctaaccattaaattctcccagtccctctaaaaattatcaaaattgatatttttattctaacagaaaattttagaatgaaatgtccaagtcgtaaaaggtcactttttcgtcgtaaacagtaaatttaaattccagttttaattatttggaaatcacaacaatatcatattaataaaaaaacttggggttaaacttacccaagctttcactatttttcaaataatttcagtttgctaattcgctcgacggcttcgataaggcggtctggttcgacgagtaaaccgattctgacgtatccgtctccttgctctccaaaaccttttcctggtgcgacagcaacgtgagcttcatttaatagcaaatctgcaaaactttcgctgtcatacccttctggtacaggcatccaagcatagaacgacccttttgactcaaaagcatgccaaccaattttttctgctgcttgaagaaaagcatggcgacgcttgtcgtatttctgatttaaccctgcgattgctgcctttgctttttcatctaaaagagctgctgctcccgcatcttgaatagcagggaagatactcacaaaaaggtggtcttgtagcaaattaagcgcttcaatcaattgttcatttcctgccgcaaatgccaaacgccaccccgccatattaaaggtcttagaaaaagtgtataactcaatgccgacatctttagctccaggtgttgacaaaaagcttggattctcataaccgtctgcccctaaggcaccataagcaaaatcgctaactaccccaacctcgtattttttagcccaagcgacgagttcttcgtaaaatgctgcagttgcaaccgcacctgtcggattattaggataattaacatagatgaatttcgcacgtttagctacttcttcaggaatagcttgcaagtctggtaagaaattattttcagcttttaacggaaatgtctcatagttgatttttccaagcgagacacttgagagataatctggataacctgggtctggcaacaagagcaagtcatcaggattcattgtcgccagaggaaattctaccaagccaatctttgcgccacccaggacacaaatttccttttcgctatcaagatttacatgataattgtccttataaaattgactggctgccgctttaaaattagcatttccacgaaattgcgagtatttatgagaagcaggatttttggctgattcaattaaagcatcaacaatgtaatcataagttggctgatctggattgccctgtccaagattgatgacatcatagccttctgccactttggcattaacttttgcgacaagactagcaaaaaactgttctggcaattcttgtaaaatctttgattgtgaaaacaccttaattcctcctaatgatacaaatctggcttgcggtcagcaaaaactggaatgtgaccccgaattttttcaacttctgtcaaatcaagttcagccgtaaaaattccctcttgattatctggcacttgtaaaatgatttttcccaatgggtcaatcaccagagaatgcccagaaaaatggtctgaaatgccatcgccaacccgattaacagccacgacaaaagcctgattttcaaccgcacgcgctcgcaataaaatctcccattgctccacacgttctttgggccattcagctaccacaaataaaaccttagcaccgctagacatcaaggttctcacccattctggaaaacgaatgtcataacaaatcacactagctgctttgacatcatctagttcaaaaacactttctttattgcctgcttgcaggtactcatcttctaccattaaaccaaacaaatgcaccttgtcataatcagcaatcacttgcccctctcgattaaacacataggtcgtattaaaaaagtgattttcttttgccgttgcgaccgatccagccaccaaattaacatggtgcttcttagcaaaatttcctaaatcccttatcgtttctttcccattaatatcagcaatatctgccagctgtttcaaggcatagccagtattccacatctcaggaagaacaatcacatctggcgcatcatgcaccgctttttccaataactccaatactttctttttattttgctcaggctccgcttcacggatagccatctgaataagtgaaactttcatttttccctcaatcctatcttctatgaaaatattctgaaatcttagtgactattatagcagtctaaaaagccctcgtaaaatagttattttaaatagactcgatagttaaaaactataactaaaaaacccacctttttaggtgggcttatgtttattttccgctatcttgtaacatttttatcagactgctgaggagactaccttctgctaaagcgactagtaaggttacccaattaacgtgaccttgcagagcatctacaataataatgtaagcaagaatcagcaatgttatgccgataaaagcgatagctaatttcaaaagtgtgtttttagatttcatctgacaaaacaactcctttatcagtcaaagactgcctaacggatgttacagattctcagctactgctgcaagaaggtcagcaattttagcggcgtctgaaccaccagccatagccatgtctggtttaccaccaccgcgacctgatacgattggtgccaaagctttaatcaaattgccagcatgaacatcttttgatttgcttgctacaagaacattgactttttcgccaatagctgccgccaagacaagcacatcagagtaatctttttgtttccagttgtccgcaaatgtacgaagagcaccagcgtcagaaacggttacttggctagcaatgtaacgaacaccatttgcttctttgacatctttaaagacatcaccagcttgcgctgcagctgctttttctttcaattcagcattttctttttgcaatttgtgcaactgctcttgcaagcttgcgactttattagtgacttctttcaattgtgggactttaagcgtagcagcaattgttttaaggtcttcttcttcttgacggtaagcttcaaaggcttctttacttgtcacagcaaggatacgacgtgttcctgaaccaatcccttcttctttgacaatcttgaagattccgatttctgctgtatttgacacgtgtgttccaccacaaagttcgattgagtaatcgccgattgtgacaacacgaacgtttttaccgtatttttcaccaaacaaagccattgcgcccattgatttcgcagtatcaatgtcagtttcaatagtcttaacaggaatagcattccaaatttgttggttaacttcttcttcgatttgacgtaattcttcagctgttacagcttcaaagtgagtaaagtcaaagcgcaagaagccttcttcattaagtgaaccagcttgagtagcgtgttcaccgataacattgtgaagcgcagcgtgaagcaagtgggttgctgtgtggtttttaatcacacggtgacgacgtttgctgtcgatttcaagagtgtatgttgtaccaactgacaagcttgccaagacatcaactgtatgaagtgcttgaccatttggtgctttttgaacatcagtcacacgcgcaacgatatcgcctttatcatttttaatcataccgtggtcagccacttgtccacccatttcagcgtagaatggtgttttagcaaagacaagcaaggcttgaccttctgaaacagcttctgtacgttcgttatcagcgatgataactgacaatgtagaatcaaggacttcatcttcgtagctaaaaactgattcttcagtgatgcttgacaatgtctcattttgcatacccattgagccgcctttaacaacattggcacgagcacgttcttgttgttctttcatagcagcttcaaagccagcatggtcaatcttgaagcctttatcttcagccaattcttctgtcaattcaactgggaatccgtatgtatcatacaatttgaagatgtctttaccttcaaccgtatctttgccagcagctttcaaatcagccaacaattcatcaagcatgcttgaaccagcatcgattgtacgagcaaatgtttcttcttcacgtttgacaattttttcgataaagtcttgtttttcaaggatttctgggtaatatgattccatgattttaccaacagttggaaccaatttgtacaagaatgtttcgttgataccaagacgacgaccgtgcataacagcacgacgaagcaagcgacgaagcacgtaaccacgaccttcatttccaggaagggcaccatcaccgatagcaaatgaaagtgagcggatgtggtcggcaatcactttgaagctcatattgtcgccatctgggtcataagttttaccagataatttttcaatttcgcgaatgattggcatgaagaggtcagtttcaaagtttgttttagccccttgcataactgcaaccaaacgttctaaaccagcacccgtatcaatgtttttgtgtggtaattctttgtattctgaacgtggaacagctgggtcagcattgaattgtgacaatacgatgttccagatttcgatataacggtcgttttcaatatcttcagcaagaagtttgataccaacgtggtctgggtcaaaatcttcaccacggtcaaagaagatttctgtatctggtcctgaaggtccagcaccgatttcccagaagttatcttcgattggaatcaagtggcttggctcaacaccaagtgaaatccagcgattgtaagtatctttatcatctggatagtaagtcatgtaaagtttatctttagggaaatcaaaccattctgggcttgttaataattcatatccccaagtgatagcttcatcacggaaataatcaccaacagagaaattccccaacatttcaaacattgtgtggtgacgagctgtcttaccaacattttcaatgtcgtttgtacggatagctttttgtgcatttgtgatacgtggattttcaggaatgacagaaccgtcaaaatattttttaagggttgcaacacctgagttgatccataacaatgttgggtcatttacaggaaccaagtttgctgacggttcaacagaatgaccttttgatttccaaaaatctaaccacatttggcgcacttgcgcactagttaattgtttcattacatctttccttttcttattactaagcggtctttcaacgcttgccatagattgaaatcatccatcaaaattgtgcttttttgtcatcaaaaaacgacaagtccacatacagagggtgacaaacagccacggtaccacctctattcaatgaacttgtcattcttcatttatatcttaaattgttttttcttcttttacttgatgtcatcagaagatgatgttcaaagcctaaaggtaagaaaacatgagtagcacatttttaaattcttccatggctcgcaacatccgccacttttctgaatctgaaactttaaaaacgattctcaatccttttaattgtactgtattttaagcttcaggtcaagtatgttattcatctgaactttcagttgtagaagattcttcagttgagcttgatgatgagctatcatcagaagaacttgaagatgagcttgaagaacttgagcttgatgatgaagaagatgatgagcttgttgcatattgtgaaaggatgcttgcaaagctatcgtctttaatcttcacatttgctttatcaagtgctttagcaataacttcgttttggaagtcagtatcactttcatattgtgctaagatgattttcttcaaacgttttttgtaagttttccagtcagaatctttttctgttttcttagttgttttcacaatatagtaagtgtaagaatatgttgatgtatcaagcactttaataacgtctgatacagaaccttcgtcttggtcaaaagcagcattcataacgtcttctggcaaatcagtatctgctgaatcaaatgtgtattctgtcttatctgctgttgtattgtctttagcgattgtttcaaaatcagcaccatctgctgttgcttggtcatgaactgaatttgctgtatcttcatcgctcaaagcaataacgatagctgttgtgtcaggattgtaatcttcataagctgctttatagtttttagttgttaattttttcttagcagcttgttttacagcgtattcaaccaacattgatgtacgaatttgttgtttgtaagtatctgatgtcaatccagctgctgaaagtgcgcttgagaatgatgaaccatatgatgaagctgttgtgttgtatgcttctgaaacatcatcgtctgatactttatcaccgtattggtcttcaaaaacacgtgataaaatcaagttcaacattgtttgttgtgatgaagaagtgcttttggcagcgttatagaaatctgatactgtgatagtatcacctttcatggtaacaagagcttttgtttctgaattgctattagtagcaaggtaagttacaccagcaccgataagagctgaagctactgcaattgaaacacctttgaaagctttactttgaacaactttttttacttttgaaaaatctttaggttttttctcagtttttgctttcttgaacccttttttttctttgttggccatgttattaaactccttaatttgtctttaactccactagtatatcacaataacttaaatattgcttaattttacagtgatatatctgctgtatttttacgaatcatcaataatccgtcgcttaacggaagtaaggttgctgttaaatttggattgtccagtgtcgcatcgaacaatcgttgaagcccacgatagattgtccgttgtccgcggcgcacttcttcgattggcttgacaatatccccaccttggaaaacatcatcaaagacaatgactccgccgactttcaaatgtttcaagacttctggcagaaagacaatgtattttgatttcgctgaatccataaaaacaaagtcaaattccccctcaagtgtcgaaagagtatcaacggcatctccttcaaccaaagtaatttgtttgcgagtgtcgtacttagcaaaattttccttagcgaaggcaatcatttcaggattacggtcaagtgtcgtaatcttcgcatctggggcattttctgccattaaaagtgctgaaaatccgatagctgtgccaatttctaaaatattttttggctgcaatgtttgcatcaaaaaacgaaaataagccacaacctcatgctgaataatagggatattttcttgatgagcaaatgcttccaattctgccagatagccctcattttgcttctgatgtgttcgcatatagcgaacaacgtcttctttcactacgggacgacgcatattgtgatttgctgtttttgaatatgatttaaccataactcttattatatagcaaaataaacccgttgtgaataggctttcttcgatttttagtcattaaaaagtgccacaatatcggataaatcagcaatgtgttgattgatttttgatgacggttgaccgagattaattgatttaatgcctgcattttcggcggcttcaacgtcaaggcgacggtcaccaacgtaataagtgcttgttttatccaaatcatatttttcaagaaggtagttaatcgcttcgggttcaggcttacgagcgaagccatttgctgatgtcaccacttctgtaaaatactgacgcacgcctagtctttctaaaacatcatttgccgtgatacctttatgcgtatagacaaagtgtgtcactcctttttgtttggttgccgcaagaacctctgttaaatgtggcatgggttttatcagataatcacgcgcttcctgctcttttttaaagaaagctgatagctccgcaaaatctaattcttgctcttttgccacttgataaagcaaagctttgaccgattctttgataataaaatccataatccattgttcatcaaaagccaagccataatgcgcataagtcacttgcaagacttgcccaatcgcttcgtaggaatccaccaaagttccgtcaaaatcccaaataaatgttgtcacttctgtctcctcatttcaatattaatctgaattctccaagtccaaggtaatccaataacgcgctagacgatgcccatcctctaaatcgataatattttccaaaataccgccagctttttcaatggttctacgactggcaatattgtcctcacgcgctgtgataagcacaggattgatgccacgcttggcatattgctcaagggcaaagctgagaagtctggtcatgataccttgtcgtctaaattctggtgaggtttgatagccgatatgtccaccaatcgtcgcaagattgcccttttccagctgccaacgacaagatataagcgcagcaattttcccattcaaaaaggcataataggtcgtcatcgttgaataatcagggttagtagtttgtgtttcttgcgctctgctattttccacaaaggttttaaaatcaccaatctcacgtgtcgtgataaagggattgtcgtcattttccaaagacgtttgataagctcggtaagctgcttcatcattaacatctagtttcctaatttccatgccagcacctcccaaaattttttctattataacataaaaacgaggttagaatgtgcccaacctcgctatattttatagatgtgctcctttttcaattaaagcttccaactcatccaagcgttcctcgaaaattcggaaagcagcgtctagataagcacttgttgtcatatccacaccagcttttttgatcacattaagcggataatcagaattacctgctttcagataatcaaggtagcggtcaatatcagcttgtgtaccgtgaacaaccttatcagctaaataactagctgccgcaaatcctgtggcgtattggtaaacatagtaattgtagtagaaatgcggaatgcgtgcccattcgtattggatttctgggttgtctgctttgctgagtccataatatttctcgtttaagtcggcataaagttggttgaggtaatcactcgtcaacacttctccagcttggtctgccttatgaatgatatcttcaaattctgcaaattgtgcttgacggaaaatggtgctcttgaagccatcaagataatgattcaaaattgcaaagcgtgctttgtcatcatcaacttctttcaaaagtgtttctgtcaaaatattttcattagttgttgaagcaatttctgccaagaaaatactataatctccataaacataaggttgattttcacgtgtaaatgtcgaatgcaagctgtgccccgtttcgtgaactaaggtaaacaaattatccaaggtatcttgccaatttaacagcatgaaagcattggtatcatacgaaccaccagagtaggcaccagagcgtttgcctttattgacatggacgtcaatccagcgttctgtaaaagcacgatgaacacgctcagaatattctttgccaaaaacagccaagacatcttcagcttttgccaaagcttcttcataagtaaaactcatatccatttcagaaagtggcgtatgaatatcgtacattttcaaatcatccagtttaaggattttcttgcgaagttccacgtagcgatgaagcaaaggcaggttagcattgaccgtttcaatcaaggtatcataaacagattctggaataaaattagccgaaagtgctgcctcacgcgctgatttaaaatgatgaacacgcgcttcatagttatgcactttgacattggtttgcaaggttttcgcataagtgtgttggaattgttcataagttgcatacaaagcttggtaagcttctttgcggacatcacgattttttgattctaacaagctaatgaaattaccatgcgttagctgaatttctttgccctcatcatctagaacgattggaaaaatgatgtcagcattatccaaaagcccaaatgtttctcctgcagctccaaaaatttcttgcgcacctgctaacaattcttcctcagcctgtgacaaaacatgcggttgacgtttgaaaagttgctcaaagaaatgtgcataagcagataaagctggtgtttctgccacgaaatcctcaaaagcttctttagacaaatgcatcaattcaggttcgtaaaaagcaaaaatttcactaaacttggcatagattgctgttgctttagcttggtattcttggtatttggctactgttgtatcttggtcgtttttcattgaagcataaacataaagcttctccaaacgacgcgacaaggcaaggtaactttccgtaatagcaagcaaatcattacttgacgctgtcaaatgccctttgtaagctttagcattttctaaatcactatcaagattagccagctccgattcccaagcatcatctgtggcaaaaactgtgcttaaatcccattggtatttttcatcaatatgactacgattatctgacatcacattctcctttttgaggtttatttaccattttatcataataagctggcggataaagccattgacgttctttttctgtttgattttgataaaagcaatgaaaattttcgtaaaacggtgataaatcttgggaaatctgacagaacccctcagcaaaatcaaaaggacgaacttgtggaaagtaagccgataaaggcaaacttagcaaattttttccttgtaaataagcttcttcttgcctttttaaccaaattgaatggcgagaagatagctgtttttgaatataagttaataaggtttggtcttggtttacctcgtaagttgaaagcttctgctgccgataaggaagtcgaaaaaatgccataatatcatctgaaaatgaacaagtcttggttagatagtgaacctttccatgcaaatcttcatagattaaataatgtaaacgaatgagctgttttgtgacatccaactcccacaaatgaaagcccatattctgcgaaaaataaagaaaatgacgttgcaaaggtgataaacgattgccgagccacaacttttcacccaacaaccaaagcacttgaataccatgactttgataggcttttgtgcgttgaaataatcgctgttctgataagcgcgaacattgcacttctaaaaccaaattatcattgacaaataaatcagccacctgatgtaaatctggtaaaactttttcaaccacgacttgttcagtccgcgacacagcatgataaagcgccgcttttaactgaagatgctcactgctttcattttcactataaaaatcacacttatccaaagaaacatgagcaaagtgcggacgcataactttgccattttttaaacgcacagcagagtggcaagctgggcaaacaaaattttggttggctgggatagcgtctaacaaagacactaattttccattttcatcaagcgctgataacacatcacacctcctacctattttattcgaaaaaaatcctgaaaaacatctgatacctaatacagataatttttcaagatttctttttcggtagaagtcaactcacgatattgtccacttggtaaatcgcccagttgaaattttccaaacattagtcgtttcaaataggtcacttttacaccgtaggctaaaaacatttttttaatctggtgaaattttccttcagaaatcgtgacataagcagagcttgtttctgaacttgctgtgataatctcaagcttagcaggcttacaaatcgttccatcatcaaaggacactccattttcaaaaaatgctggcacatcatcagctaaaaacgcattaacctcgacataataagtcttggcaacgtgatatttgggatgtaacattcggtaacctagcggaccgttattggtaatgagaagcaagccttcggtactgcggtcaagtcgtccgactggataaagctttggaacacgatctgcttctttgattaaatcaatcactgtctgatgttctttatcagacactgctgaaacaacgccagcaggtttattgagaagaaaatatttctctgatgactgtttgacttgttttcctgatactgtgattttttgcagactgggctcaacgttgagattatccgcttcagccaaacgaccgtccacatacacttgacgactgcgaattaattttttaacctgatttcgcgacccaaaaccagcctgacctaataatttgtctaaacgcatggttctattttaccatgttatcagtgatttttagacagtaaaagtctgagtgtcaaaacccagactttacgtttattagtttaatttacttgctgcggcttcatctacaatcacgacaacattagggtgattttgaaggacactcgctggcaattcttcagtgacaggtccattaatcatttgattgatagcgtcagctttactttcgccataagccattaaaacaaccattttagaagccatgattgatttgatacccattgaaatggcttgttttggcacatcatccatgctggcaaagaaacggctatttgcttcaatggtgtcttttgccaaatcaacaatgtgtgttgtcacgtcaaatggtgtcccaggttcattaaaaccaatatgaccattgcgcccaattcccaaaatttgaaaatcaataccgtgttcagcaatcacttggtcataacgacgtgtttctgcttgcaaatcttctaccaagccgttaggaagaaaactttctttaaatggtttgtattggaaaagattttcttgcataaaatgacgataactttgctcgttgtcagctgccaaaccaacatattcatccagattaatgctagtcatatctgagaaatcaagattgctctttctgatttcttcatagaaactaagtggtgtgctacctgtcgcaagtcccaatgttttagctcccttagccatttcatctttcaaaagagaaaatgccacttgaccaccttcaacttgattattaacacgaattactttcatttttaaatcctccaacatcttctgttttggtatagacctcttatctatttttattatatggtatataccaatttttgtcaagggaattgtttaaaaaaatccgctcattattaatgagtgaattttgctagcgtgttcctgctaattttccgagaccttcgccgacacaataggcaaaaagcgcagcgattaagccgataaatagggttctaaaaatttcttttttcttactgctacctgtaatgattgctttcaccaagccaagtaaggctaaggcaagtgataccaagacacaagcaatcaaaaatgtgtgtattttaaagagactaaaaacattaatcaaaagatatgacagtaaaggaattaagccgaaagtgataaatgacataaaggttgctcctgcattttttacagcttttgctttgaccgcagattcttctgtcgtagagcttaaataatcaccaactgccatcgaaaaaccgtctgctaaaagatttgaaaatcctaaaataagaatcggtttaatccccaaattaccaccgacagctcctgctaccacagcaaacgttgtgacaatgccatccataccaccgtaaacaattgactttgcataatccctaattgtcatatccgttaccttccattagtgagtaatgagttaattttaattagaatcattctaaataacttcatttttattatatcatctctttaaaacgattacaattaccctcgaccagatgacgagaaatagttctcgtgttataatgtaaagttgaaaatataaatattaaggatttactatgaataccaatgattttgattttaatttaccagaggaattgattgcccaaactcctcttgaaaaacgagatagttcaaaacttttggtcattgaccacaagacacatgaaatggttgatgctcattttgaccatattttagatgaattaaaccctggggatgcgcttgttatgaacaatacgcgtgtgcttcctgcccgtctttacggtgaaaaaccagacacacacggtcatgtggaattgcttcttttgaaaaatacacaaggtgaccaatgggaagttcttgccaaacctgcaaaacgcttgcgtgtcggagctaaggtgtcatttggtgacggacgtttaaccgctactgtggttgaagaattggaccacggcggacgtatcgttgaatttgcttatgacggtatctttcttgaagttttggaaagccttggcgaaatgccattgccaccatacattcatgaaaaattagatgacccagaccgttaccaaaccgtttatgctaaagaaaatggttctgctgccgctcctactgctgggcttcacttcactcaagatttgcttgccaaaatcgaggcaaaaggtgttaaacttgtctatctgacccttcatgttgggttaggaactttccgcccagtgtctgtcgataatatcgaagaacacgaaatgcactctgaattttatacgctgtctgaagaagctgctcaaacacttcgtgacgtgaaagctgctggcagacgtgtcgttgctgtcggaacaacatctatccgcacgcttgaaactatcggttcaaaattcaacggcgacatcaaagctgacagtggctggacgaatatcttcatcaaacctggctatgaatttaaagtggttgatgctttttcaacaaacttccacttgccaaaatcaacacttgttatgctagtgtctgcctttgcaggacgtgaatttgtccttgacgcttaccaacacgccattgacgaacgctaccgcttctttagcttcggcgacgccatgtttgtgaaataatctaaaaaagaacggaaattttccgttctttttattctgccatattggtataaacgtcttggacgtcatcgtcgtcttcgagtttatcaacgagtgtttccaaaatgtctgcttgttcgtcatcaaggctaacgtaattttgcggaatcatgctaagttgtgcttgggcgaattccaaattttgtgcttgcaaagcttctttgacagctggaaattcttttggttcggtaaaaatttcaaaggcgtcatctgatgttttcaaatcttccgcaccagcatccaaaatcacttcaagcatggcatcttcgtccaagtccaaattatcgcggtcaatgacaatgtaacctttgcggtcaaacatataagcaacagaacctgttgagcccatgttaccaccgttacgcgtaaaaatggtatgcatattcgcatctgtacgttttttattgtcagtgagggtatgaacaaggatagcgacgccaccaggtccatatccttcataagtgatttcatcatagtttgttgtatcgccaacatctgttgcttttttaatcgcacgattgatattgtcttttggcatattagccgcacgcgctttatccaaaaccatacgaaggctggcattcattgacgggtcaccaccacccgctttagcagctacaaaaatctcacgtgacaatttattgaaaatcgcgccacgtttagcatctgcttcaccttttttatttttaattttgctccatttattatgtcctgacatgcaaaattcctccctattccttgctattatatcacattccgccacaaaaaaagcagaacatcatcgagttttctcggattaacgtcctgcttgataaataatctataaattaaagagccatattaattaaaggatttttgatacgttgaaatcactttgttacttttgagtaaagctcagcaactttttcccaattaataacatcaaagaaagctttgatgtaatctgggcgaacgttgcgatacttgagatagtaagcgtgttcccaaacgtcaagtgccaaaattggtgcttttccttgtgaaattggtgtgtcttgattagctgttgagagcacttcaagtttgccattttcattcaccacaagccaagcccaacctgacccaaaacgagttgtcgcagcttgcgtgaaagcagctttgaattcgtcaaatgagccaaaagcttcctcaatcgcagccaacacttgcgctgttggttcttgtttttcaggcgataacaattcccagaaaagggcgtgattcaaatgcccaccaccgttattaatcaccgcttgacggatatctgctggaatactgtcaacatctgccaacaaagcttccaaatcctctccaatttctggatgtttttcaagcgctgcatttacatttgccacataagtagcgtgatgtttatcatgatgaattgtcattgtttctgtatcaatataaggctcaagagcatcatatgcataaggtagttttggtaaaataatagccatgctaattacctctttcatttttgtacccttattttataggaaaatagcagagctagcaaattatttgaccgcttttttcaaggcatgattagtgatgttcgtgagcgatttttaagatagcaatatcaaataaataagccttatcatatgtcccagttttaatggcataatccgtttcaatcaataccgccagagcttttttcaagaacggcattgaaagcgtacgagagtcacgcaaagcaaacttaacttgataaggattgacacgacgtccaagataatctgacagcgccgttacagtttgctgctcatttttaccttgactggctaaaatgctgacttgcaagaacatgcgaaactgccctaacataatcgcaatcaatttgatttcatcctcaccttgcaaacacaaatcacgaatcagctcgcgtgcctcatcgattttgccattcaaaacaaactgcgtcaagtcgaaaatattatcctgaagcgttttgggaatggcttgattaatatcatctgtcgtgatatgaccatcttttttataagatttcaaaaaagcaatgtttttcaaaatctcactgaaatcataattggatttcaaaagcaaagcctcaaaaacacctgaatcaaaggtcagcttttctttgtgagccaatttttggaaatacgtttttagctctgcttcttttaattcacttgcttcaaaaatttgtgcatcacgtttaagaattttcaccaagcgacgtttgccgtctaattttcctggcgcaaaaataatcaagcgcgtcgtatccaagggattttccaaatatgcctcaaaacgtttgagtgccttatcatccaaataagacttcttagctgtcgtgatgtcgagcaaattatcaaaaataaccaccttttggtcagcaaaaaatggcagactttcaagatccatttccgcatcttgataatcaacctcagccatatcaaaataagaataagtcaagtcatccttatcataaccaacacgtgccatcatacgctctttcagctgagaaaattgtcccaaatcctcacctgtcaccaccgtaatcaaactaagattttcttttcgtaatttatcaatttcttcgattgcaatcataaagatattataacaaaaaaccatgagaaaaactcatggttcatgcgaaagttaactatggaattttttataagcaaactgctttaatgtttcatcaaaaagacaaattctacttctatcgctatccaatccctgctttttcaagctatcttgaataatcttaccgtagttcttgctaatgcgacaatgttcaggtaaagccattaattcctttaaagctataagtttctcctcactaaaagcttctagctcaataaaagccccaacatgactaggaaaaagatcaaaacaaatagccgtattttcttttttgtactcatgacgtttcttttgagaaaacatgcgacaacgtgtgaatcccaaatcgtacaattgatttatcagataaatacaattttcggatacgttttttccttctagaacaatccgaggaagcactacatccaattccttttgtaataaacattgaatatcagaaaaagcaagattgtcattggaattactagaatactccaattctacatactcttggtaatgattattttgacgtttgagtttaatggtcaataagtatctcccaacacttattatgcgatagcgaatgactattcctttagatttgctttcaaaattaggtaaatcaaccgtaatatctgtttcaagacattcacccacagagacaaagcctgcctttctcactttctcttcgtaaatactcaaagcttcttcagatagctgatatttcaattctaattcatttttagcgttactcaaactcttcaccttcagtcatatagtcctttttcaacacttttttcgattaattcctttgctaattgccacaaaatttctgaatcttctttaatgaaagctttcttagtcaagactctctcagccgttaatttatcgggattataaccttcttccgaaacaaccaaatgattaatcagcggtaccaaagcatcaataattctagcatatcttgcttctggactatttcctttttcaaattcaaaccacaattctgtaaatttctcgccttgaatgattggtaagattgctaaacttttctgtaacgataagtattccttatcatgtgagacggctttgcctgtggcatcatacacccaagtatcacctgcgtaaatttctcccaaatcatggagtaaaagcattaaagtcacttttcctatgtccaatttttcaggaaaataatcttgaaaaaggtttgctactaatgcaacctgccaagaatgttccgcactattttcaaatcgcccatccaatgtcctattaaaacgtgtcacagtttttaacttctcgatttctttaacaaaatcaactttgctctctattgcttccattctcaccctcctttttataacatagtatatacttatgctaatctaattgcaaagcaaaaacagcagtcaatcgactactgttattatgctttcaattttaactctaaagcttcggttaacacttgtgagaaattaagatgtttttcttcggctaatgtgtttaaatactctggaatggtgacatttttgcggactttcttagaatgatattttttcatataagcaagcatatcaatgggaatcagagcaatatcaccgtctggataactttttttcaattcagaaatagctgttggcttaggataatcggtataatcttcaagcaccattcctagtacctcttgagccatttcataggcttctgccaaatcctttccttgagtaatcgcttctggaatatctggaaatgtaatagtgatattatcttcatttgttgtaaaaatagctggataaatttgcatcgtactcttcctttcgccttaggataatagactaaacgtttattttaatcctgcttgtttcaaaatagcttcttctgttcctttagcaagttctttactatgcataggaacggtcgtcacctttcctgtttcaaaatttttcattaaaagatgactacctcgctgacgaactttaatcaatccactttgtttgagaagttttaccatttgttttggtgtttttggcataacttacctttcttaattatacacattttatacgtattgttcaactatttcattattccccctacctcactgtttcgattttccagtggtttaatcctctaaagcggatagcgccttgttcgtctgtacggtaaatggtcatgttttgtgctcggaagcgttcaagcgtttcttgatgaggatgtttgtagcggttattttgccctgcggaaatcaaagcaatttgcggtgaaatgtgagcgagaaattctgagcttgatgccccttttgagccatgatgtcctgcttttaagacatcaaccggcagattgggataagttgctatcaactcttgctcgccttcttcttccaaatctcctgtaaataagaaattcttacccaaaagattcccataaagcaccaccgagtcattgttaccaccatcaccagtctggctcggataaagcacttgcaggtgacttcccataatcggcaaaacatcaccagctgttaccacgcgcaccttggttttcatggcttgtaatttcgccacaaaatctggttttgtcaaacttccctgactaaccagaatttcaccaattttcacctgctttgccacttccagcatatctcccatgtggtcagtatccgtgtgcgtcagaactaactggtcaatttttccaacgccgcgactgttgagataaggaatcaacgttcgctccgcattgctatccgtcaaccgctcctgccacgcgttcttctcactaaaactcacctttccgcccacatcaattagcagcgtatgccccttaacatcacgcacaaaaatactatctccctgcccaatatcaaccaccgtcacctcgttttctagcggatgcttgatttgaaaaaatagcagacctactaagctgacaagaaaaattgccattttctttcgtcgccagcaatcataaagcacgcctaatgttaaaaatagcagcaccaagataccaagacttggtttaccaaaaacaatcggaccgcccaaaattgccttagtgttcttgataacagtttccaagaaaacaaaacaaccattaaaacaagtcagtttaaccaagggcgataaaataaaaatgattgatagcattggcaacataatagtgtcaaatgccacagaaaaaattgctgtcaataagacagataacggttgaaacacagcaaaaaaatgaattaacaagggcaaactggctaatgaaatcgtcaaactttccgcaatgattttctgatagcgactaatgtcatcaaagttaataaaactgagaataaaagcgtaagtaaacgaaagaatgcctcccgtcgtcagcagaaaatttggcataactatgaaaagaacaaacaaagttaaagctaagttatctaattttttaataccaagatttgcaaaagcagactgaattaaactccgaatcaccgaaacagaaaagccagtcagccccgcatagacgagtgaaaatggaatttgtagtatgtccacataatctcggcgtaacccaagacgtagaaagaaaaagcggaatgcccccacaaaaaagccgacctgcatgcctgaaagagcaaaaaggtgaataattcctaaactcgtgtaaacatcactcatctcatcaaacgatttatccagatagccaaacaaaagcccagtcatataatgttgcataggagcaggaaaatgccgctgaatactaacaatagcctttcgtcgaacatcatgtagcttctcccacaaagtcatcttataaacaagtttaacattgttaatcgccgacaaatttaccacacgataaataccttcatgtttaaggtaagtacgataatcaaaaccaccaaaattccgctggggcgttgcttcttccaagtccatatcaccagataaaacaaccgtttgatttaatgtcttaaaaaaatgctgttctttctccgatttcaaggtataaaaaatctgataagtccgcccagcttccttacctcgaaaggacagcaaatccccattgaccgaaatcgtgtcaggaatcatctggatttttgctaaatgagctggtgctgcttgataagcctgctctgtctgattagacttagtcagaaaaaataccgcaaaacaggttaaacacaagcaaacttgacaccaagccttccaaccatactgttgccataaaaacaccaaggctagcaagagaaacatcaaacacccaatcacttttgaaaagcaaaaataatagagcaaaatgagcaaaaaagccaattgaattggcttaatgggaaaatatttaatcaacggtcacctcagattttagcttttctagtgttttttctccgataccagacacattcgccaagtcatcaactgatgaaaaaccaccattggcatcacggtagtcaataatgtcttgggcacgtttggcgccaatgccagaaatcgtctggagttccgccaaagttgcggtattaagattgattttatctgaactttcttcctgttgagcgctgccatttgcttgtgaattagtcgttgtaggagcaacattttcaccaactcttgccacataaatcaccgcttcatcggttactttttcagccaaattcaccgacttcttatcagcatcttctgtaaaaccacctgctaatttgaccacatctgtcacacggctaccgcttgaaagctcataaacaccctcatttttcacagcgcctttgatatctacaaacactttttgagtttcagtttgcgaacttgaacgttctgtttttaaatcacttgcgctgctacttgccgaaaaagtcgtgcttagggcaggtaggtcactttgcgcatccactgttgtttttgtcacatttgaccaagcaaaaaatccgattaacataacaagtattgttcccaacaccgctaccaacgttttgttctccaaaagtttttcttttatttcttcaatcatctcactacctcacttttgacataaaaaatagactcatacgagcctttacttatttattcgaaaaagcccagcaaaatcgctgagcttttggttcttatttcattttacggtgcttatctgggtcccaaacaaagcttgcaatgtagctaaagagcaatgtcaacagaacaacgataatcgccacaagtccaagaggaatacggtaaatgtaagttaatggatttggtttctttttggtatgataagtcgcattttcagcatccaaacggtcaaattctgtttgaatacggtttgccacttcttcaatcccctcgtcattcatgcgtttgatgtcagaaatgtcaattggattaccaaagttcatatccacacgttctccagtcaaaagtccttttaattccattggtcctgcataaacgactggcataatcttaaccttcgccattttagcaataacagcaaccccacctttaacatcggttgaatgacggctaccacttgggaacatcacaagtgaacgattgcttttcttcaacatgttaatagggtatttaagagctttttgccctggattttcacggtcaatcggaaaggcaccacacatacgaatccaccaaccaaagatacgattcgtaaacaattctttcttcgccatgaaaataaattctttcggacgagcagcaaatgccatataaactggatcccaccaagtacggtgcggagcaaccaagatatagttctcatccttacttaaaattttgtcctcattatgatagtgagcatttccattgataatccaaagtaggaaaaccactaatcctcgtaaatacgtataaaacacagatttactcctttttcttcaatcattctttaacattgtaccatgcttgagccgaaaaatcattacctaactagtgagaaaagctaaaatttgctataatgaatgtcatggttaaatcaattttaaaagctggcgaacgtattgaccagctcttttcgacagatgtcaaaattattcaaaataaagatatgttcagctattctatcgatagtgtcttgctgtcacgttttccaaaaatcccttcacgtggcttgattgttgacctttgttctggaaatggtgccgtaggactttttgccagcactcgcaccaaagcaccgattatagaggtagaattgcaagaacgtttggcaaatatggcagagcgttcaatccagctcaatcaattagaaaaccaagttcagatgattaatgacgatttgaaaaatctgctcaatcacgtgccacgttctggtgttgatttgattctgtgtaacccaccctatttcaaggtttcagaaacgtcaaagaaaaatctttctgaacactaccttcttgctagacatgaaattgctaccaatttagaagaaatttgtgaagtagccagacacgcgctcaaatcaaacggacgactagctatggtacatcgaccagaccgtttcttagacatcattgacaccatgagacaatacaatctagcgccaaaacgtatccaatttgtttatcctaaaatgggcaaagatgctaatatgcttttgattgaagcgattaaagatggctctactgacgggttaaaaattctcccaccactctttgttcacaaagaaaatggtgactatacggacgatatttttgaaatttattatggaaaaaacggaagaaaaaactaaaaaagcttatatgtatgttgtcgaatgtgctgatggcacactctacacaggctacacaaccaatgttgaaaagcgtatcaaaacgcataatagcggcaaaggtgcaaagtacactagaagccgcctaccagtcaaactcatctaccaagaaagctttgacagcaaagaagccgccatgtccgccgaaagctacttcaaacaaaaaacacgacaacaaaaactggaatatatagaggaacaccaatagaaacccaaaaacgcaccctatcatcatagagtgcgttttatgtttatctttcccctttgttacggataacaaatcctgttttcttttcgcttgatgtgcgacgtgggcgtttgttatctttgttttggaaatcacgtttgttcttagatgatgtgcgtttgaaatcacgatagccgttattgtctcggtcatcacgttttctgtctgaacgcccaccacggcgattatcacgaccgcgaccattgccacgaccacctttgcggttattaaagccaccacctgacggtttaaatggtaatggtttttcacgcgcaatttccacttttggaagcgtatctgggtctttaacagtcaagttcaagatgtacaatgccaattcttctggtgtaaattctgctgccaatttaacagcatcacctttgaatttgtcaaagtttgcacgaatcgcttcatccgcaaaatcacgttcaattttcttaagcgcaacttttttcttcgctttaaaagcttcatcagcagtcgctggtttcaaccctttcatgcgttttttcgtcaatttttcaatgattgacaaatatcccatttcgtttggtgctacgaaagtgattgattgaccatgtttcccagcacgtccagtacgtccaatacggtgaacatagctttctggatcttgtggaatatcgtagttataaacgtgtgtgacccctgaaatatcaagaccacgcgctgcaacgtcagtcgcaaccaagatgtcaatattgtcattcttgaaatcacgaagaacacggagacgtttaccttggtcaaggtcaccgtgaataccttcggcccgatagccacgtaatttcaatccacgtgtcaattcatccacacgacgttttgtacgcccaaagacaattgacaattcaggttgatcaacgtccataagacgtgtcattgtatcaaatttatcttgttctttaacgcgaatatagtattggtcaacaagatcagtagtcaattctttagcagcaactttaacgtgttcagggttctgcataaatttcaccccaatacgtttaatagcttctggcatagttgctgagaaaagaagggtttgacgtgtttcaggaacacgactgataatcgcttcaatatcttctaagaatcccatgttaagcatttcatctgcttcatcaaggattaatgtttcaacatggtcaagtttcaaagctttgcgtttaatcaaatcaagcaaacgccctggtgttcccactacaatgtgagctcctgaacgaagtgccttaatttgtttctcaatgcttgacccaccgtaaacggaacggactttcacacctttttcacgaccaaaacggaacaattcttcttgtccttgaacagccaattcacgtgttggtgcgataaccaaggcttgaacaagattacgatttgtatcaattttgtccaaagttggcaagccaaaggctgctgttttccctgttccagtttgtgcttgtccgataacatccttaccttccaaagccaaaggaatcgttaattcttggattggagatggctcaacaaagcctgctttttctacggcagcaaggatattttccgataagttaagttctgtaaatttcaaatttttctcttttctaaaaggcagtgcgaagctgccttattaaactttaatttcgttgtttaacaacttatctagtttaacacattccaagttaaaaagataggaaacagtttcatttattaaaataacacgttttcataatttctattgttagaattttctgtaaaagactatttttattagtcgtttaaggtttttttaaggtttatccgatagaatataggcatcctaaaacttttctttttcataatctcaaaaagatagccctgattcgtcggggctgtttttattttaactcctaaaaaggtctgagcgcgcaagttcagacctttatttatttttatcttggcatgaagaacgacaaaagaagttgagcactttctcaactccttctgtctttattacattttttcttctagttcaacatctgggtatttatccgcaaaccagcgaagcgcaaagtcgttttcaaaaaggaaaacaggttggtcaaagcggtctttagccaagatatttcggcttgatgacatgcgttcatcaaggtcttctggtttaatccaacgaacagtctttttacccattggtgtcatcacaacttcggcattgtattcattttccatacggtgtttgaacacttcaaactgcaattgaccaacggcaccaagcatgtattcgccagtttgataatttttataaagttggatagctccttcttgcaccaattgttcaatccctttgtggaatgatttttgtttcataacgtttttagcagctactttcatgaacaactctggcgtgaaggttggtagcggttcaaattcaaatttatttttaccgacagtcaacgtatccccaacttggtaagttcctgtatcgtaaaccccgataatatcacctgcaacggcattttcaacattctcacgtgattctgccatgaattgtgtcacatttgacaatttcactgattttttcgtacgtgctaaattcacgctcatgccacgttcaaattcacctgaaacgatacgcacgaaagcaatacggtcacggtgtcgtgggtccatattggcttggattttaaagacaaatcctgaaaaatctttatcgtaagggtcgatttcattgccttctgttgttttgtgtccatgaggttctggcgcaaattgtaagaaagtatctaggaaagtttgcaccccaaagtttgtaagggcagaaccgaagaatactggtgttaaatcaccagacaagatagcttcttctgaaaattcatttcctgcttcttctaacaattcaacatcttccaaaacttgttggtagaatgggttgttagcaaataattcatcaccagcttcaagtgctgcaaaacgttcatcgcctttgtaaagttccaaacgtttgttgtacaaatcgtaaagcccttcaaatgattttcccatcccaattggccaattcattggataacttgcaataccaagcacttcttccaattcttccaaaaggtcaagtggttcacgaccatcacggtcaagcttgttgataaaagtaaatactggaatattacggtgtttaacaacttcaaacagttttttcgtttgtgcttcgatacctttggcagaatcgacaaccataaccgcagcatctaccgccataagagtacggtaagtatcttcagagaagtcctcgtgccctggtgtatcaaggatattgacacgttttccagcataatcaaattgcatcactgatgaagtaacggagataccacgttgcttttcaatatccatccagtcagatttagcaaagttccctgtctttttcccttttacggtaccagcttcacgaatttctccaccaaaataaagtaattgttctgtaattgtcgttttaccagcatctgggtgactgatgatggcaaacgtacgacgttttttaatgtcatcttgaattgtcattttatttccttattaatcttaattatcttctttatataaacgtatcacctaatctttagtgactacattggtccactccttttctgccatacaaaaaatagagtcatgggactcataactctattattataacgaaaagtgggctctatttcaatatttccccacggtgttctcctcagaaaccgcaaaataattgattaagagaatactacacatacaaagactgccaccatagtgctccatgatattgataaagaaagttatcaaaaagagcatcgtatggaatagtgtcagtttcttccctctcaactgtgcaatgagaaaaattggatacagtagaaatagaaaaattccctgacgtaataatgaatcaatataaaaactatcatcgtacatcggatgcccatttatttcggtaaaagttggaatatttcgtggcaaccaatcaacaccgaaatgctgcaaatacgtatgtccgatattcaatcttcctgaaaacaaatgattcaatgttgcataaatggtactatcaccattgtagaagtatggaagccctagccccaaaccaaacatcacaatcaccagtggaataatcacagaaccagaaacctgatactttagtaataatggtttcaaaaaatagcaaagaatgatgaccccagcaattaaaaatgttgtccttgagtcggtaatcgcaaaaatcaacaaagaaacaagcaacatgaccagtcctgctctagctttacggctctttctaaccaaggaaaaatcaaacaacaaaccaaccagatacattcccaaagaatttgggtgcataaaaccataagaatgcctaatcaaatctttgtcagctcgatacatggtcatatcagaaataatatgactattgtaagcaaagagcactaagattgctacaatcagcttgaagtagaaaatcgctgtcatcaaccgctcatcgtccttatcaacactcgctgataacaaaaacaaggtaaccatggacaaatcatcaacgtttgtttccagataattagacattggcaataaaatcaagaaaactagtgcaaaaatccctgctaaaatcttctctatcgaccaacctgaacgccaaaaactccacaaatacatggcaaatccgccaataatggcaagacttgacatcaataagaaaaacggtagaggaaacggataacgtttcaagaaccaagctagaaatagcaaacaaaactcaagaaaatacaaggctcgataaagaaaccttgcaaatgactcctcagtcctaaacatttcctttaaccttaacatctccacagtaatctattcctccagtgcttcaacaactttagctaactgcattgagttgctacctttcaacaagatttggtcagctggttgcaatactttttgaacagtttcaagcatggcatcaaattgatcctcgtcagctgttttcttgaaataataaacttttccaattgggaacatttgactagcaagttgtgccaactcggcaatatcttccccatagaaaatgagtgtatctaatgtttcaggtgacaagctcataatcatgcgtttatgaagctcaacagattgttcacccaattctttcatgtcagcaagcacagcgatttttttaccaccctcattggcaggaattttagaaaatgtctctaaaattaatcgcattgctgttggattagcattgtaaacatctgacaaaatatcagcaccattggctgcttttttccattccgtacgattgcgcgttaattcgattgtctcaagagcctcgacaatatcgtcatcagaaatggctaataatttaccaacataagctgccaccatggcattagtcgcattgtattttccaggcacaggtagggtaattggacggtcaatcacatttgtcgtaaaggtcaacgattccttactttcttgcaaatctttcacaaaaatttctgcgccgtcaccaaaacgaataaccatttggctttcaggtaaataaggatcaacgattgtgtcagctggcgcaatcaaaatgccatctgaatccatgccatcaacaatttgcaatttaccttctgcgattttctcacgactaccgaaaaattccaaatgagcttcaccaatcaaggtcaccacaccgatatgtggttttgcaagttctgacaacagatgaatgtcacccatatgatcttgccccatttcaaggacaattttctccgtatcatctggcatatgaagtgctgtatatggcaaaccaatttcgttattgtagttgccttgtgttttataagtcttatattctgttgataaaaccgcagcaatcatatctttggttgtcgttttaccatttgaccctgtcacagcaatgacatcaacacgctgtttctcaagataatagctagctagcgcttgaaaagcctctagacaatcatcaacccaaatgtatggatgaccagctacttcacgctctgaaaaagtcgcaacagcaccattttcaaaggcagtttcaataaaatcatgcccatcacgcgcaccttttaatggtaaaaataaatcccctttttcaatcttacgactgtcaaattcaatttgtcgcaggggaacgtcatcaaactccgaaatagtatttttagcaccaacaaccttggcgacttcatgcaatgttaatttcatattgaatccttcattaaaaatctagtgttaacgccttttattataccacattttagcaatcatgcagggatttttatggtacaatgtaattgcaaagcttgttttgcacagagtagatgattcgcgttaagtgtgtgtgaatgggatgttgtcacacaacgaagcaatttgcgcggtgaatcattgcatccgctgttaaatttttttaacagctccagttttatgttttaaaaggagcagaaaatgaatttatttttcaaaacacccaaactcacccttaagcgtttggttagcctagctatgctaatcgcgcttgctttcatcgttgggaaattttcaattcccgtcattccacaacaattagttgtcagtttgacgttcattgtcaacacgattatcggaatgattggcggtcctatttggggctttatcagcctaggtattcttgatgtggttgataccttatcatcaagtagtgctggtaatttcatcatttggtggacacttatggaagcaattcagggctttttctatggtcttttcttttatggtaagccactaagctggtcaagcaaaaaagactggctacacgtaacaatcgcaactgtggttatcatgctaattggcacctttatcctcacaccacttctgattcagatatactttggtgtgccattctgggcacaatatctggcaggacgttggttaaaaatctttgaaattccactacgaatcattattaccatgcttgtcattccgaggttacaaaagatacctgaattacgcaagcttgcaaatctataactaaaaaagcctcagagagttatcccatctctgaggttatttcatattgaaaaagcaccccaattgttagatttattgtctaacttttggagtgcaacttcttttttaaatcaaatggctttcgcgtttttcaaacatttctttagctaattcaaccaatttttcaatcaaatcagaataagcaagtcccatgttttcccaaagaagtggatacattgaccattgtgtgaaacctggcattgtattcaattcgttaaggtaaacatgaccgtcttctgtcaagaagaaatcacaacgtgacaaaccacatccaccgatagcacggaaagctgttgttgcatagccacgcatttcttccataatgctgctatcgatatgcgctggaatatccatagtaattttattgtcgatatatttagcatcgtaatcatagaaagcaacgtctttaacaacttcaccaggtaatgttgtttgcacatcagcatttcccaaaatcccaacttcgatttcacgcgcattgacaccagtttcgataagaatacggctatcgtatttaagggcgaggtcaatagctgagcggagcccctcttcatcatcagcttttgaaattcctactgaagaccccatgttggctggtttaacaaagactgggtaagtcaatttttcatttacttcagcaaccgctttttcaaggtcagccccttcaacataagtcacgtaagcaacaagtggtacacctgcagactcaagaacgtgttttgttgaaattttatccatggcaacacttgatgacaagatgttagttccaacgtaaggcattttaagaatttcaaggaagccttggattgaaccgtcttctcccattggtccatgaagaacagggaaaacaaccgctccttcttcataaatatcacttggtttaattttttgactttcaacgacagtagcgttagtcattaatttttcatcatcggctggtttgcttgaaaattcttgtgtcttaataaaatcaccagattgtgtgatgaagtaagttttcacaaagaatttgtcataattaatcgcacgcatgacactctcagctgataaaacagatacttcacgctccgcagaacgtccaccataaagtaaaacaagcgtttcttttgccataaactttaattacctgaacagaaaaaagataccaagttaaggtcacttaatacatttttcaacaagccgagcatgaaccaaaaacagccccaaacccaactcaagttcaattccttttctattacaatttcctacctatcataccacaaaagaagcttcctttcaaacacctacagccataagatggaagaaaagatgacaaaggatgaggggatgtaaataagatacttttacaaataattcttaaaaaaatctattgttgctttccaagaaataacagaatctgataacaaattctcttttaaaatcttagtgtatcgctgattaggttgataagcaattgttagcatatgacctccattgttcaataaaatagactttaccaatccattttttctcttctgcaactgcttctctaatagttttattgaaaactctgtattccaaatttcatcagatttctcacctatcattaatacattagctcctatctctttcgccttaatcaagctgctgagttcataatcactaaacttttgtcctaaaaatttttctttaaaaaattctctgatactaaattttgtataaggtagttctttattctgatatgtccaagaagagtgtttagaatttatcctgccttttaaaccttctaatatggcacaagagggggaattgacaacaaggcacctaatttgtgaaaaaagacttgctgcaaccaaagataactccgcacctttagaacgaccatataaaccaattctattttcatctacaatttctaaattggctaaataatctaaattttcctttacaatttccaaaggtattcgatccaaatacctgcttattcccctaagaccaaaataagcaaccgctaaagttacaaaacctctacttgccaacaactgagctatattttgtgctttttctattcgaccatcactaccactaaatacaatgattgctggtaaattttgagcattgctaggataaaataatcttgcttgatattttgaagaaataatagtttcatgcgaaatctctggtaactgataatagcgtttgaagattttttcagctatttttttacttttagaaaaaatttcaatttttacataaaaactgtcataaacaggaatatccctaacgtcttccaacaaatgatttttctttgattttaaaggtctacaagaaaaaaataatcccatatcaattttacctatataatctccttctagagatatacaattattaacagaaactaccccattatcgtcagcttgatattttgcccaagcataccaaggtgtttcagaacctattctcatcggcgcattaatattataataatccagtaaggtcatatgaacatcaataatctgatttggttttaattgattaatcataatatcgaatttatcatcagctaatagactttcactcttcaaatttattttgatcgttttcttcactaacttcctcatctcccttccagtaatcatgattatttgtactttcccatacattttcaatagttttcatcaattctaaaacctcatttaaaaattctgctgaataggaggttaaaatactataaatttctttttctaagtagctttgttgcaaatcatgttgttggacgacgtcacacccagtattcgttaaatatagtgaatgagtattggaagttttatttttcgtttctttcattaaaaaacctttttcacttagtttattaaccatctgagtaactgcacttctagaaattttcttttttctagctatctcggatagatattttggcttttctttagcaataaataccaaaaaatgaacctcagttatagatagttctggatacttttccattttgtgctgtcttttttctaaacggttataacttttaataaaagcagacagatgtttattaatattttccaaaattttcctcatctcttttgttaagcaacttaacaaaattttactatgtttttaaaaaatatacaagcaaaaaagcagcttcacgctgcttttcttatatcctacaattctgttcggttttctatggcacgaagtagggtgacttcgtcggcgtattcgatgtctgagccaacagccagtccacgtgctaaacgtgttaccttgattcctgctggttttaggacacgtgagatatacatagatgttgcttcaccgtctgcggttgcattggttgcaataatcacttcgttgacctcactatccattaaacgtgtaatcaatgatttcaaattaatatcatctggtccgacaccgttcattggtgaaatcaagccatgcaagacatggtacaagccatgatactcttgaattttttccatggcagatacgtcttttgaatcttcaaccactaaaataacggaacggtcacgagtttcatctgtacagatattacaagggtcttcatctgttaaattcccacaaacagaacaataagtcaattcacgcttagctgccaataaatttttggcgaattcattcacatcttcatctgacattccaatcgtgtagaaagccaaacgtgttgctgtttttataccaattcctggcaattttgtaaaactatcaatcagctttgcgataggtgttggataaagcattgtcattctcctttaacaaagtgacgagccgactacttcctcggccgactcgctttcattatcaattattgattaacataagttgacatgtacaaattaataatatcacgtgcaatgtattggttggtatgattatctgaacttgtcaaatgcggaatgataactgcaacagcaatatttgaatcatcacttgttgaatagtcataggcaaggacactcaagttaaccgttgttacagcattaccgttagcgtcaacagcataagtttcggctgtacctgttttaccagcgatagtgactgttgaactcttcatgtaagtacctgttgcataaccactactactatttaccacttgatagaacccttgttgcaaaaggtccatatcatcgtctgaaatgttgatttcattaagcacatttgtttcaattgttttagctaaagttccaatgccatctgtgccatcattgtcatagatactatcaaccaaatgtggtgcaatacgtttaccaccattagcaactgtcgccgcatattgtgccaactgcattggtgtgtatgagtcatactgaccaaatgcttcggttaggacattaccagcagaatagtcatctgaaatgtaaccagtagtattttctggaaggtcaattcctgtgcttgttcccattccgtattcggcataggcagcacgcaattcttccatggcttctttcatacctgtggttgctagagacatgcctgagtagtattcttgtcccatcattttaagagcaacttgtaccatgtaggtatttgatgagtattcaagcgcttgaacagctgtgatgtttgttgagccgctacctgtaaaccatgatgtaatcgctgaggaaccagcaatattaatggattggtcagcgataacttggtttcctgaaatggcacctgattcccaaccagctgtcaatgttgctgctttcacgactgaccctggaacaaaaatatcattaatagtaccaagggcatcaagagtagttgttgacgaacctgtttcatgagagagtccagccattgctaaaatggcacctgtctgcggattcaaggcaactgcataagctccttctgaataggttgcataaccgtcagcaatatcagcactataatactgatttaaaatactttcaacacctgcttggaaatctgaattgaccgttaatttcagattttgccctgcttttccttcgcttgtcacttcatctgaaaccacattgccatttttatcagttgtgatttcacgaacggtgtgtgttccttgaaggtattcttcatattctttttcaagataagacgttccgacacggtcgttcaaagaataaccttttgccaagtaatcatctgcctcttctgctggcagaccagaatctttcgaggaaaccgtaccaataattgaagcaagggaacttgttggcgtttcacggtcccagtcagttgcgattgaaattcctgacaatttagactgattagccgtgatataagcaatttgttcttccgttaagtcgccagtcgtcaagttaaccgtgctaaatgttgatgcggcattcatttgactaaaaatataaaccaattttagttcatcttcagagtaattaatttcatcatcagttaccgcattaatcgcatttgcgtaaatttctgattcggtcaaattgttaccgtaactatcatatttttcatcatcaggtaaactcttgactaccgctgcgtaagtatctgaatccgccaaataataatcttttttctgacgtgtcgtaacatctgtctctgtaagagtcactagagttgacaatttcgccgccaattctttcatctcttcagctgtaatcgtattgctacgagtaaaagcaactacttgcttgacagtattagaaactaataaattacccgcagcatcgtaaatttccccacgagggtttgatgttgttaccgtataagttgttgacgaatttaatttctcatcataaaacgatttattcaaaatttgcatctgagccaatctcaaaatgataattgaaaaaaggacaacgatgattgaaaaaatcaaataaatacgtttcgtcatactagtcggctttttaacaattttaaacttacgtacttttttttcgtttttttcggttgttttgcttgtcttagttgtttttttggcaaattttaatttgctcaatctcttcttaaatgacattctttcctcacaattaaaagctctgaattatattttatcacaatttgcttaaaagagagtgacacaacctgtaaaactttgaccttttttattttgaaaatttccccactacaaagcccttgaaaataaagaaaaagatgaaccaaggttcatctcaatcttcttttgaagtgactgaaaaatcaacaccgactttgtctcgtaggaatttccaaaggtagtaagcaatgtaaaagtcaatacaaccatggacaagagaaccaaagccaatcagtccgactagtgaccaaacataagctgcaccagtgtgtccccctgcagtcaaaactaaaacaacgatgaattctgccaagccatgcaagaaattcaagaacaaagccaaaagaaatgttgataaaggtttctcaagcaaacttggacgtttttgaaccaagatagctcccacaacagcaaataacaaatgagaaacagcacgcaaaacgatgacaatcggaaagcccgccaataagaaacctaagcttgttcctaaagcaactaaaaccgcaacttgcggtgaaataaacattgccataaaaacgggtacgtgacttgctagtgtaaacgaagcaggtccaataaccactttaactggcataaccattggaatcagaatcccaaacgcaaccaaaattgctgtaaaagcaagagattttgtctgatttcgtctcataataactcctttatgatatctatcaaaaccttgatttaccaaccaaggcactatcagcttcttaaatgttatcgataaaaaaagcctattgacattatttagactaatttccccaagaacaaccgtcccagagccactaattagtcttgcctattataaataaaaaaagcacaggtgtcaagacacctgtaactgtttagttagacttcaaaagtaagcctttatctaataacatttccttgatatcttcaaaatcatcttttgaatgacaagaaagcgtatgtgtgtgaatcccatgtgttagcgaagataaaagtgtcgcattagaatgttcaaccttatccataaaattggcaatatcttcgttacttcttatatcgagcggcgctgttaacatgccataaacaggatgttcaacttcaacatcaaccacaattccacccttagcaacaatgctgtccaattcttctttggttctctcaggaccatgttgacaagcaattttcccgataaattggtgcgaataaagcgcttgtgacatcacataacctttaggtgtcgaaatcacgtcatgattagctgctcttaacagagcaacatcaccaacaataatttggcgactaacaccaagcctgctagctaaagaactggctgaaatgggaacttgcgtttggctcaaaatatcgataattttttgacgacgttctgctgctttcataaaagcccctccaaatataatccttactattaatcataccataaattttcaaaaaaacgtccaccagatactcacacaaaaaaatttagcaatttttcaaaaaatgattaaattgtgaaaggaaaaacatctcaaaccgtacaaggagtgtttagttcgtgtcactaactttttctgtgctgtgctataataaagctataaaaatttatcttgttataagcaactcaaccattctgtgggagaataaaatggagattttaagagaaattaatatcacaaaagacaaaaaattagccatttggctaaatatcatatcccttcctacttttttcctatttttttatcttttttacttacttggtttaaagattcaacaccctactattgaaaatgttatctacactattcatttgggaaaattatttctttttgtgctagcgatacttgctgttgtcatcattcatgaacttatccatgctttctttttcaaactctttaaacctaaaagtaaagtcaaatttggaatcaattggaaattaggagcggcatatgctacctgtccaaaagtgacttatgacagatggcaaatgatagtcattagcttagcaccttttatcatttggtctctaacgctgactatcctctttggtatgaatttattatcttttcctgcctatgtcggaattgccagcctacatgcaacaggatgtatcggtgatttctactatgtctatctccttggcattaaatatgccagaaagaaaattttagcagaagacacagcggtaggactaatcatatacagtaaaaattaagctaaatttggcaaatgaattttggggagtgggacagaaatcggtaatttcgaagaaattcgatttcgtcgtcccacccccgcaaggttgagtagggttgtaaaagctgatttatcagcgcattagaatccactcaactactgcgtcttgcaaataataactatataaacaaagaagctgggtacttttgtcccagactctttttagcactcaatataaaacgttcgttatgactaaaaaatttgtcaaacaaaaagcagaagtgacccacctcctaccgcagacacaaagtctgtttcaaggggagttagaccacttctacttcacttacattgtacatcactctttttagttttactataagtaatataaaaagcactctaggagtgaacctagaatgctttcatatcaagggttttagcccttataatctactatcagattatttaccaaggtagtattcgtttgtaacgtttaatttttcgtcgaattcgaatacaagtggtgggaagttagggatttcaacatccataatttcgtcatctgacaattgtttgatatgttttacaagagcgcggattgagttaccgtgtgcacctacaaagacgtttttaccgtctttaagagctggagcgattttatcttcccagaatggaagagcgcgttccaaagtaactttcaagttttcagcatctggaattactgtgtcgtcaaggttagcgtaacgacggtcagtgtgtgctgaatattcgtcatctttagccatagctggtggcaatacatcatatgaacgacgccagatgtgaacttgttcgtcaccccatttttcagcagcttcagctttgttttgaccagtcaaaccaccgtagtgacgttcgtttaagcgccatgatttttcaactggaacccaaagttggtcagcagcttcaagagcaaggttagttgttttgatagcgcgtttaagaactgaagtgaaagcaaggtcaaattcgattcctgcttctttaatcaatttaccagcttcgatagcttgttttgtaccttcttctgaaaggtcaacatcagcccaaccagtgaaaaggttagctttattccattcagattgaccgtggcgtgcaaacactaattttaccattagataaagtctcctttaaagtaatacaaaggctattaacgcacagcgaaaaataggtattagcctatcagtccagcgacttgataagttagactatttttggctcagcattctagccatattaattattacgaccagataaagtcgcttacccttactattctacccaaaaagctgtaaaaaagctagtaaaattactaattttctctaaaagactcaatgtccgctggtcatttttaaaccgataattccaatgacaaccaaaatcaaaaaaaggtaggtaagcggtgataattggtctttaagaaagacaattccaacaactactgttccgattgcaccaatccctgtccaaatcggataagcaagactcatcggaaggtcctttaacgcacgcgctaaaaagacaaagcttaaaatcattccaagaatggttaccattgagtagccaagcctgctaaaattctcacttaatttcatactcgttgcccaaactacctccaatattcctgcgaaaatcaaataaatccacgtcattttgctctccttttccttgataaaatcaaaaaaatggcaacaacaccatttctttatccaaaaggatatccctacgaaatgatgttatcgccattccccactttccggggaaagtggtagctttctatatgattgatgctattataaatcaaattattttttatgtcaatgtcatggtacgcatggcattcaaggttgcgagaatcgttactcccacatctgcaaaaattgctagccacatattcgccattccgaggctcgctagtaataaaactagaactttgataccaattgagaatatgatgttttcatgagcaatacgaatggtcttgcgagcaatcttaatcgctttggcaatctttgataattggtcgttcatgacaaccacatctgccgcttcaatggcaacatcacttcctagaccacccatggcaattccaacatcagctctggctaaaactggtgcatcgttgataccgtcaccgacaaagccaactgtggtacgtggtgattttttagcaagatatttttcaagttcatcaaccttatctgttggcaatagctccgcttgatagtctgtgatgcctagctcatcagcgattttttcagcaacttcacgacggtctcctgtcaacatcaccagatgtttaacgccagcttgtttgaattgttccaaggcttccttggtgtctgacttgatgcaatcagaaattacaatgtgccctgcgtacgctccgtcaatagcaacatgaacgattgttccaactttgctacaagccttccattttgcccctaggctatccatgaatttggtatttccgacagcaacattatgtccgttgataatagcgctgacgccatatcctgacttttctgtcacgtctgtaatggaacaatcatctgcttctttttcataagcttcgcgaagcgattgggcaattgggtgagttgaaaaacgttccacgtgactggctaaatgtaacaactgctcatccgtaatatcattgggatgaagtgccgttacttcaaaaacaccttctgtcaaagttccagttttatcaaaaagcaaactctcaagtgaagctagactttccaaataattagaccctttaaccaatacacctgcttttgaacaagctcccaatcctccaaaaaagctcaaaggaattgaaatcacaagcgcacacggacacgaaatcacaaggaaagtcaatgcacggctaaaccattctgggaaattcccagcgaaattaccagaaacgagaggtggcaaaacagccaaaatcaccgctgcaatcaccacagttggcgtataaacagccgcaaattttgtcatgaaatgctcactttttgacttgttagcagcagaattttctagtaaatccagaatcttgcttaacgttgaatcctttacagaatgcaaaactttaacacgaataacccctgtcatgttaatcattcctgaaagcacttgatcaccaacttgaaccatttgcggtaagctttcacctgtcaaagctgctgtatcaacagaggattcaccagcaatcaaaataccgtctatcgccactttttctccaggatggatagaaatgacttgcccttcttgcacttcttgtgggtcaatatcaactacctcatcgcctttttctaagtgaacaaggtctgggcgtaaatttaacaattcagcaattgatttttcgctgctaccttctgcaatatgttcaaataattcaccaacttggtaaaatatcatgacaaaaacagcttccgcaaactcagattcatttgttataaagctcaagacaaatgcccctaacgttgctatcgtcatcaaaaagtgttcgctgaaaacttttcctttactgattttcagcaccgcttttcttaaaacatcatacccagcaataagatatggtatggcgtaaagtgcagcctgtactggtaaagatggttgtgttgcctttaccactccaaaaactagcaaaaatcctaaaatcgctagtaaaatccgtctaagggattttttgtttttttctgacattgtcagtcctcctcataatgctccacgacggaatctaaaacctgactgatatgcttgtcagccaaagcataaatctgattttttccttcacgtcgtacagatacaattttcagatttttcaacaaggtcaattggtgtgaaatagctgacgggctcatttgcaaaatagctgccagctcactagattttaattcaccctgacttaggcaccaaatgatttgtaaacgtgtcccatttcccaaagccttgaaaaaatctgaaacattttccaatagctctccctcaagcaactgttgtgtttggctatcttctatcatctaaaattactccaatatcaatttataaaacatttgaacaattgctcaattgttttatgattaaaatatagcacttttaccgctttttttcaaggaaatactagattttttcaaaaataagaaatttgtgctacaattcttgtatatacaattttttggaggtagtaatgaaagcttttgcacttacagacagctcacagcgagcgatttctgatttagcaataatagatattccaaaacctaagatttcagcggatgacgttctcgtcaaagtgaccgctgtcgggcttaatcctgtcgatttcaaagttatcgaaaacggtgttgacgcttggacatttccgcatatcatcggtatggatgttgtcggagaaatcgttgagcttggtgagcatgtcactcaatttcaaattggtgaccgtgtggctgggcatggcaatttaaccaaacaaggttgcctagctgaatttgccagcgtccctgcttaccaattagccaaaattcctggtggcatttctcatactgacgctgctgcactactctgtaatggattgaccgcttatcaggcactatttcgcaaagcaacactcgctaacaagaaaacaattctcattcatgcaggaagtggcggtgttgggagcattgccattcaattagccaaaatggctggtttgacggtttataccacagcttcaactgctaaggttgattttgtcaaatcgctcggtgcagatatcgtgattgattacaagaccgaaaatgttagtaggcgaattgccgaactcactgacggacttggtgttgacatgattatcaataccattggtaaagacgaatcaaccgaagatttgaaacgattagcttataatggcagtctgattgcagttgtttcaccaccacgcattgacaatccaagtgacttatttagccgcgccttaagcattgacgtcttaaatcttggcggcgctcatttatcacacaatcctcaacaagcccaagaccttgcaacaatgaccgaagaactctttgcacttgctcaagagcaaaaagtaaaagcccttgttagccaaacattcccatttgaacaaacaaaagaggctttacaactgataaaagaccgaaaagttacaggaaaactggtcattgatatgaatttaaactaaaaacgttcggaaataacttgctttccttctaactaaatagtaaaataaaggtggcttaaaaatatctttctagccactacactattcttggaggactttatggtttcaacagcaacaaaaattggtgctttcgattttgacaactgtttcatgaatgccgctggcgtttattgcatgacacgtgaagaattggcagaaattgatgtctctgcagctggttctttcgttacaaaaacaggaacattgacagcacgcgctggtaatcctgaaccacgttatgcagacactagccttggttcaattaactcaatgggcttaccaaataacggttttcaatattatcttgactacgttacagagctccaaaatacaccaaatagcaaacatcatttcttatcacttgttggcatgtcagaagaagaaacacataccattcttaaagccgtccaagattctgactaccaaggattggtggaattaaacctctcttgtccaaacgttccaggtaaacctcaaatcgcctatgattttgaaacaacagagacacttttaagagatatttttacttatttcactaaaccacttggtgtgaaattaccaccttacttcgacattgctcattttgaccgagcagctgcgattttcaatcaatttccactcacttttgtgaattgtatcaattctatcggaaatggtttgattatcgaagacgaaaccgtgcttatcaaacctaaaaatggctttggcggtattggtggcgactatgtcaaacctacggcgcttgctaatgtccacgctttttaccaacgccttaacccatctatccaaatcatcggaacaggcggtgtcaaaacagggcgtgatgctttcgagcacatcttgtgtggcgctagcatggttcaactagggacaattttacaccaagaaggtccagcagtctttgaacgtattacgaatgaactaaaagccattatggaagaaaaaggctacaaaagccttgaagatttccgtggcaaattaaaatatattgattaaatatcacaaaagccaaaagcatctgagacaatgtcccagatgcttttttctttctattatttttcacctcagaaaatatgagttttgataataagttatttcctatttagtcattacgcattaaattcaagattggttttttgacaaggaataataccacaccaatgccgatacagattaaacctagaataccgaagaatgctacttctgttcctttattgaaagatggtgtaatcaaggcatttactgcttgtgatgttgaatctgccaagaaccaaagagcaaccatttgtgattggaaagcaagcggtgcaaggcgagttgaaacagatagacctactggagaaatcaacaattcaccagacatttgaactgcaaacatcactaccaaccacatgaagctcacgcggccatgtgtaccgtataggatacctggcacagccatgataaggtatgagattccagtcaacaatagacccaaaccaaattttgaaacggcagatggttgacgatcacccaatttgttccaaagccatacaaacgcaggtgtcaatatcacgataaataacggattaagcaattgataccaagaagggtcaatatgaatagtgacacctaaaatagttggatttaggtttgaacgtgtttcaccccaaaccgcaataactgttgaactttgttcttcgactaaccaaaaaacaatcgaagataagaacaatggaaggtatgccaacaattgtttacgttcagtacttgaaactttatttgaggtaaacattgtcgcaaagtaaataaatggaatgacaatacctgcccatgaaagaacattaatgatattattaacaaagtttgatggatttaaacgataaacgaagaatccagcaataaagataatgactaaagcaacacccaacttcactaacaagctttgtttttcttcttgacttaatgggttagacggtttatttcccaattctgggaattgtttcatgcgtccaaaccaataaacaaacaaagcaaaaatcattccgattgcagcaagcgagaagcctaggtggtaattgatgctttcaccaactgtccctactacaataggagcaagtaatgaaccaatgttaattccaacgacaaatatgttaaatcctgtatcacgacgtgggtcatctgctgcatacaagtgaccaaccatgtttgaaatattggattttaacatccctgttcctagaataatcaaaaagagtgatacaaatagagatgccaagccgaacggaatagctagaacaatatgtcctagagtgataagaataccaccgatgaaaattgtttgagaagctccgagaatacggtctgcaaaccatccaccgataattcctgaaagatatacaagtgcaccgtaaatactaacgatagccattgcttgagttttaggaagtcctaaacctgcattaggcgcggtaacagatgcatacaaataataaatcaaaatggcacgcatgccataatacgagaatctttcccaaagttctgtttgaaataatgtaaacaaagctttaggttgtccaaaaaatgttttttctatttttttacccatgcattccattatataaggaattttagactttatcaagttagtttttctgacatcatttatcacaaatttcctaaaaagcccataatatcaagcattctatgtcataaattctcaccaaaaaaattttgttatgtttttaatagtcagaaaatagctatcaaatcatgttagcttttaactttttcatcagcaatatctaacattcaatgtatttttatattactgaagaaaaattcttctttaacattattcttatattcttgatttttaatttttgaatagtcgtgataaaagctcccataaaattgacccaacatcttaattatgaccgagtaaaaaagtgcccaatggacactactcacttttctatttctagacaagtagaaaaaagcatcaaacggaacttactcgctttcctatttctagacaattaaaaaaagcatcaaacgggacttactcgcttttctgtttctaggcgagtgaaaaaaacgtccactggacgtttttttttatcaccaattgtcccagaaatcatcatcttctttttgttgagcttcttcggtttcttcttctgtcttttctgtttttccttgttcaatgaccttgccgttttcatctactttaggtttcatcacaaagctataagcaataaacatgataactttcaaaattgaaaaaacgcctaaaaaaatgacaacgattaaaagggatttatccatagcacactctcttctgatttttctctgttgattttgatagctaataaactaactttcatagcttaattatatcacaaaccatccaacaattttctaaagctatttgttcctaaaagtgtccataacataataaaaagcccatcaatcaggctataaagcgcaatatgatggacttttaaatgtaaattattttacagcgtctttaagtgctttaccagctttgaatgcaggtacttttgaagctgcaatttcaatttcttcaccagtttgtgggttacgacctttacgagctgcgcgttcgcgaacttcaaagttaccaaaaccgattaattgaactttttcgccttcagaaaggaagctttcgattgctgagaatactgcatctacagctgctgctgaatcttttttagtaagctcagttgcttctgcaactttagcgattaaatcttgtttgttagccatttaacaaatcctccaattaatttctaagcgttaacactttaacacgttctatgatacccaaaaatactttttaggtcaagtattaaacgtttttttagtcgtttttcttgtaaatatcaaagttaaattggtctccgacaagatcgatagttgtcgcttccaaataaatgtctgcatcgttctccagattttgaatattaatattgattgctgattcgtctggcaaaacttcgacaaaacttggcaatttataacttgatttaatgtatttcaaaacctctgattcaggcaaggaaagtgtaccaactgaaaatgatgtaatttttagctgaactgccccagaatcaagacggctaggttgaaaataaatataaagcggcacttcatagcctaaaagggtgtatgtcccttcaaacataatcgctgatgatgtggcatagacggtataagacatctggtctgtctgataatcttccaaataagcagcaacagtttcgtttaattgctcacgatttgttgaaaaagtcccaaccttaacactatccgtttgtttagaactaacgttctcagccgctggttccctcacttgaatcaaacgactagcaataacgccaacaaacgcaatatttatagccaaaatgaggagaaatccccatttccaccaattaattttctttccattcttctttagtttcactgattttctccattgttacatctgacatgatttggtaaccaatattatttgggtgaaaatggtcaccactaaaaagtgcatcgttaatcacggttgtctggtcaccagaagttgaaacaattccttcttcaccattaattcccttatataactcgtcgttgataggcacaaaatagacattgtcatactcttcggtgacactttcagtagcatcattccaattatcaacgatttcttgcatttccgtcatatcagggaaattgaggtaaaacggattgtaaatacccaaaatataaatcggcaaatcttcattatctgcacgcgctaattcaataatctgacgcaagcgtttctgataagatttggaaggtttggtaaaagatgacacagataaactcgttaaattctttcgaataactgccatgacatcatttccaccaacggttaaggtcatcatatctgccttagccagcgatttttgaatgtctgtcttttcttgcatccgctgcaagatttgcttgctggtatttccagaaacaccgtaattactatcggtaacttgataatcataggtatccgttaaactctgcgccagcaaaggaacaaaaccaccttggctagtagtgtcaccgaccccttccgtcaatgaatcaccaatcgccacataattaaacggtgtcgcttcttgcgccaaaaaatctttctttgttagctctgtatcagattttggaatcagcacactaaaaataacaataaacagaagaaggcttgctaaaaagaaagcaaacccagttaaaatattctttttcttactcataacgtaccattaccgcaaaggcattttcacctgtgtgtgtttggataattgaacctgtttcaagaacagcaatcggagctcctaacacttgtaacttttccttaaatccatttgccatatcagccgtaccacagtaagaaataccgatttctgctacttttttacctttagcgtattcaataaaattgtctagccacttattgaacgtttttagaccacgtcctttaataattggatttaattcacaatcaaccatttccataacaactttaatgttaaggagtgagctaataagaccagtcacacgtccgatacgtccaccttttaccaaattttcaagcgttgacacaccaatataaagttcagacttttgacgaacttcttcaactttagcaataacttcttctaagctgccaccttcttgagccaattttgcagcttgaacaacttggaatttttgacattggtctgtaaaagttgagtcaataacggtaacgtcagcacctgctagattagccccttgacgtgctgcttcaactgtccctgaaagtgtatgtgtgatatgaatggaaacaatatgctcagcaccatttttcatcaagttttcataaacttctgcaaaaacgcctactggcggctgacttgtttttggcaattccttactgtttcgcatcatgttaaggaattttccttcttctttcaaatcactatctgaatacacgacaccatcaatcatgaccgataacgggataacggtaatgtcatatttttcaaccaactcaggttcaatagttaaagaggaatccgtaacaattttaattttactcattttctatcctatcatactttcaatacttgtatctaaattttattctaacattaattataccaaatttttaaaacttaggggacattttatcagagaaagtctaattgcgcaaaaaagaagccttacggcttcaattttatttcttcaaaagttcgcgagcttgttcgcgcgccatttcggtaatatcgctaccagcaagcattttagcgatttcttccacccgttcttcttcggtcaacaagcgaaccgttgaaacagtcgtattttcatcactgcgtttttcgataaagaactgataatcagcaatagcaatcacttgtggcaaatgcgatattgccaagacttgtccgttacttccgattttatagattttttgagcaatagcttgcgcaacgcgaccagatacaccagtatccacttcgtcaaagacgatacttgtcttgtcctctttacgtgaaaatgccgatttaatagccaacatcaagcgagaaatttcgccgccagacgcaactttaacgagtggtttgaagccttcgccagggtttgttgaaatgtaaaattcaacagcttcattgccatcacgattgaattttcctttggtgaattggacttgaaaatcagccttttccatgtacaaatcagccaattcttgcttgatttcagcttccaaatctttagccaaggcatgacgttcttgactgagttcttcagcagcaacaatcaattctttttccaagcgcttaagggctttttccatgtcatcagatgactcatcatttccagtcaaaagattgtattccttggtgatattatcataatactctaaaacatcatcaacactaccgccatatttgcgtgtaatgctataaatcacctctaggcgcgcttcgatttgttgcaagcttcccgcatcaaaatcaaggtcatcaatgacatcacctaggtgtttcgtgacttcttctaagatatagtaagcttctgaaacattggctgacatttctttatagtcagcatcaaattcttcgagcgtcatcaaatcattcatggctgaacgaatgttagacagacttgaaaattcttcgtcatcaagcatgacataagcattggtcaacgtatctgcaatgtttttatgattaagcaatttatcacgtttttggttgagtgcttggtcctcaccagctttcaaggctgccgcttcaatctctgctatctgaaattctagcatttcaatacgcgctttatgctcttgttcatttttttgcttggtcacgacacgcttacgcaattgacgatagctttcaaaaagctcttgataatgttttttgacatcagcaaactgttcattaccaaattcatccaacatccgaatgtgcatattgggcttcatcaattcttcttggtcatgctgcccatgaatatcaacgagatactgcccaactgcacgtaacgttgtcagattcaccatttgtccgttgatacgaccgatagaacgaccattttgcagaatgtcacggcgaataatcaattcttctgtcacatcaatgccattttcttccaaaatctgtgtgagcgcaggattttcaccaaccgaaaaaagcccttcaatttcagccttgttagccccatgacgaataacgtcaagactagcccgcgcccccagcatgaggttcatggcatcaataataatcgatttccccgctccagtttcccctgtcaaaaccgtcataccattttcaaaagtgagcgagatttcttcgataatggcaaaatttttaatggaaatttctaaaagcattgggtgacctcccttagttacggtctttcatccatttaagcacttcttggcgaattgctgctgctccttcagctgttttggcaactactaacaaactatcatcatcagcaataatactgaaaatcacatctttaaaatcttccaacaagaagcgtttaatcaaacggctgtttcctggaatcacatcaagattaatcatgttttcaagtcctgctgtttcttctgaaatcgcaagaacagtacttttaattggcacagaaacttgaccaacttttttagttttatcttttgaaagcccataaatataaggaccttcaggtgacggtactttgatgataccaatttcattcatgtcacgtgaaacagtagcttgcgttaatgtcaacccttctgcttcaagcaattttagcaaatcatgctgtgtctcaacagcattttcagcaacaatttttttgattaattctaaacgttcactctttttcatctttaaattccttatgtgccttttctacaatttctggaatcatggcagtcactaaattttgagcgtcagctgatttttccaaatgagccaaaaattcaatgttaccatgtccaccttgaatcggtgaaaaatcaagccctttaactgtaaatccgtaatttagagcaaaatctgtcacattttccaaaactttttgatgaacagctttatcacgaacgattccatttttaccaatctgctcacgtcctgcttcgaattgtggtttgataagagccacaacttgaccattatcagctaaaatattgtggagcgctggcaaaatcaaattcaaagagataaagctaacgtcgatactagcaaaagttggttgaccttctgtaaaatccgccaattcggcatagcggaaattatactgctccatgctacgaacacgttcatcctgacgaagtttccaaaccaattgattggtaccaacatcaaccgcatagacaagttttgcaccattttgaagcatcacatcggtaaaaccacctgttgaagcaccgatgtcgattgtcgtttgaccgtcaacagaaatctcaaaaacttgtaaagctttttccaatttcagtccaccacggctaacgtattttaatttttcacctttgagctttagctccgtcccgtcgtcaatcttctcacctggtttgtcatagcgctcaccattaatcacattgacaaccaaacctgccatgacaccacgttttgcttgttcacgtgtttcaaaaagcccttgtttataggcaagcacatcaactctttccttaggcatttagtcgcaacctttctatcatttcagtgatttttcctgcattaaacgcttgtgtttccgaaagtttttggaaaatagctagcgcttggtcgattgattgattcaaaatgtcatatgatttttctaaaccaagcaagcttggataagtcgccttatcagcaagcaaatcttttttcggcgtttttccaatttcttcaaatgttgctgtcacatctaaaatatcatcacgaacttggaaagctaacccaaccaagctaccagcttcgcgcaatgactttaaatcatcagctgctaaattcgcaacaattcctgccgccacaactgggaaggtcaataattttcctgttttatttgcatgaatcaattgcaattcagaaagattaagcttacgctcttcgcctttcatatcaagcatttgtccaccaaccataccataagtgcctgaagcttgtgataattctgcaatcaaacaaactttggtatcagctgatagcgcagcatttgccaccaaaccaaatgggtctaaaaagaggctatctcctgctaaaatcgccgttgcttcatcaaattttttgtggttagtcaaacgcccacgacgataatcatcatcgtccattgctggcaaatcatcatgaatcaaactacctgcatgaatcatttcaagagcagctgccacatcaaaatgaccttctgtcaactcgatcccaaaaccttccaaaatttctaagaaaatcaagggacggatacgttttccgcctgcctccacagaataaagaatcgcttcaattaactctggcgaaacaacatctgactgtgcataataacgtcgaattgcctgattgatttcgtttaatttatccattaggcatccatttccgtttctgttccgtcagcctgcatcaccttgacaagtgttttttcagcagattctaacgttttttgaagctcttttgataacaccatgcctttttgaaattctgcgatagcatcttccaaagcgacatcaccattttcaagtttggtaacaatagcttctaaatcttgtaaattttcttcaaatgtttttttatttggcatcttttacctccacttcaagctgaccgtcttttagtcgaacagtcaattggtcgcctactgctacatctgtcacgcttgagataatttcttcgtttttttgtaccatggcatagcctctggcaataattcgactagtatccaaagacagcaaagcatcttgtgccttttcaaatcgtgctaacttactatcatattgacttgtcatgttagatattaaaaggcgttgaaaagcttctaaacgctcttgataacgtcgaatatcacttcctaagtcaacagccaaaagacgttgatttagcagttgttgccgttgactagcctgattaaattgagtttgcatagtgttcgtcaactgagttgtcaaacgatccaatttttgaacatatccgtcgtataatcgctcaggttgtctaaaaataacggattttgctagtttatccaaatgttcttgtttttgtttaatcacgcgcaaactagcttgataagccctattttggcgctccgcaatccaagaaataatatcagctttcgttactggcgttgctaattcagcggctgctgttggcgttgccgctctacggtcagccacataatccgccaaagtcgtatcagtttcatgtccgacacttgaaataactggcaaacgtgattcaaaaatggcttgaacaacaatttcctcattgaacgcccagagatcctcaatcgaacctcccccacgaccgataatcaaaaggtcaaggtcatctcgctcattggctttggcaatatttgcagccacttcctgactagcaccttcaccttgaacttttgttggaaaaaggaggatttcaacccctggaaaacgtcgtgaaacggtcgtgataatatcacgaatgaccgctccgcttggactggtaacaacaccaattttcttaacaaattgtggtaattgacgcttatgtcgctcatcaaaataaccagcttctgctaattttttcttcaattgttcaaactgaatcgctaaggcaccaattccatctggctcagctttttcaataataatcgaataagaaccacttggttcataaagttggacacgaccaacaacattgattttcatgccttcttccagctcaaaaccaagttttttaaaggttcctgcccacatcgtcgcttgaatcaccgcattttcatctttcaacgaaaaatattgatgcgttggacgacgacgaaaattggagacctgacctgtcaaataaactcgctccaaataaggatcacgatcaaattttaatttaaggtatttagtcaaactcgagacacttaaataatccgacatagcaggctcctttccataaaattccgtacattagacaatttttgcatatcaaaataattatatcaaaaaaactaaaatattgatacaatgcgttatcgcgcccactcttcactttcttattttaagatttttggattaaaaaaactatccagtggatagttttttctcgagtaataatcagtcctttcacagaaacttgattttctagcgattcttgttaccgaattaaaacagtcagttttacttccatctcctgaaagcctgacctataattttagaaaattttatattgccaatatcaatgaatgctaacgataactccctcagagatgttctcgtaaaaccatttggcatcttcttttgacattctgacacagccgtgagaacaaggtgttcctaatttttcagcttcttctttaatttcatttccgttacaatccgttggcacactgtgaaagagatacgttccatggtctttaaaagacacccagtaataagctccctcactagattcttcattgtagaaaaaatcaccacgttcagcttcaatggcaaattttcctgtcggcgtcggactatctttagcacctgtcgaaacggtcgtcttaaatattacttgatttccagaataaataatcatcttctgttgcttaatcgaaacaagaatactcacattgctgtaatttgccaaattaggataaactttcttttcgttcttctcttgaatctgtacttcttgctgccttggctgaatagctttattaatatttcgataaagacaatagctaagaatgataaagcacaaagctaaaaataaaacagtaatcctttttgaaaacttcttttgcatctctcttccctaaaataatgctcccactagaaaatcatttccaagtaggagcaacatctctaaacttaacaattctaattaatcaatacataacgtctcaatccaccataactaacataagaaatccattgatgaccatcagcactaaacgcttggtcgtagcggatttgataccctttatccaaggtaaactcggttggtgctgatacttttggttgacttttcacttcttttggacttgtccactttgtggcatatctggcgctggttgagctttaggagcctcaacagtcgtgcgagttgctgaaacaccttttaatgaaccatcattttgctcatagtaaagatgaacattatactcaccagaattatttttatggtctttaacattaacagctaccttataagtgccatcattttgttttgtcgcattataccagataatatcatcttgcccaccttgcgttgaccaaactggcactttcaccgttttcactccattaggatttgaaacttccgaaataatgacatcaaatccttgtggtgattggttggtaatcgccaattgaccagaaagcttagcttccgctactgttgttttggtgccaagtacgccacgcattttgccgtctgtttcttggtaatagaggtgaacattgtaatcaccacgctcgtttttgtgctcagacaatttcacgttgactttatatgtgccgtcactttgtttcacggcgtcataccagatgatgtcatcttggtcattttttactgtccagactggcactttcacggctttaatgccattgctatctgaaacgttcgacacgataacgtcaaaatcaccgttggcatgatttttaatatcaactttaccagtaacacttgctttggcttccgcaactgttgcttttgtacccagcacgccacgcattttgccatctggttcttggtaatacaaatgaacattgtaatcaccgcgttcgtttttgtgctcagacaatttcacgttgaccttgtatgtgccgtcactttgtttcacggcgtcataccaaatgatgtcgtcttgatcattttttaccgtccagactggaactttcacagctttaataccattactatcggaaacgtctgacacaatgacatcgaaatcgccgttggtatggttttgaatatcaactttaccagtaacacttgccttggcttccgcaactgttgtttttgtacccagcacgccacgcattttgccatctggttcttggtaatacaaatgaacattgtaatccccgcgttcgtttttgtgctcagataatttaacgttaactttataggtgccgtcactttgtttcacaccgtcataccaaatgatgtcatcttggtcattttttactgtccagactggcactttcacgcctttaatgccattgctatctgaaacgttcgacacgataacgtcaaaatcaccgttggcatgatttttaatatcaactttaccagtaacacttgccttggcttccgcaactgttgtttttgtacccagcacgccacgcattttgccatctggttcttggtaatacaaatgaacattgtaatccccgcgttcgtttttgtgctcagacaatttcacgttgaccttgtatgtgccgtcactttgtttcacggcgtcataccaaatgatgtcgtcttgatcattttttaccgtccagactggcactttcacagctttaataccattgctatctgaaacgttcgacacgacaacatcaaagtctccattagcgtggttttgaatatcgactttgccagttggagcttgtgtttttagcgtagcaattggaatatagcgacgtaccccaccgtagctgacataagaaatccattggtgattgtcggcttctaaaaccttatcgtagtaaccaagtttaaatcctttttcaaaggtaaattcagtcggcgctgacattttaggttcatttttcacttcgacaacttcgttaaaggtataagaaccttgttctggaatattttgcgcaccagttgttttctctggaacagtaactttttcagcaccaataccttgcagttttccattttgttcaaggtaataaaggtgcacattataattgccagtttctcccttatgttcagcagttttgacactgactttgtagtcaccattactttgtttaacaccgtcataccagataatatcatcttgatcatttttatccgtccacacaggcaattttacagttacaacaccattagggtcagatacatcagtaactaaaacttcgaaaccttgactgctaacattttgaatgttaatctttcctgataatttttgaactgctgttggtgttaatttttgaatagcagcataacggcgttgacctgaataagatttataagaaatccattggtagccatcttcgctcaaaacttggtcgtaaaaaatacggtcgccagcattggcataaaaagcaactggcgcagaagctttcggtgtatttttgacttccgtctgtttggtataagtatagtagccttgattaggtaaattattagctgttacaggaatttttgattcttcaaaaacatgcgcttgatttgtttgaacatttttgcttgcttgcgatacatttaccgtaacaacctcattttcatttgattcagaagaggtggtctcttcgtttgattcaacagcttggctagcttcggcttgttcctctttcgtaacatctgcagcttcttctgatttattgccatcagtatcttgatttattgctggattaacagcttgttcatcagtttcatcagaagtaactgcttcagtgctctcatctgctgttgtgacatctgcttgaacattagattcactaatagcagatgaattctcactctctttttgaacatctgccactgtctctgttgaaatagcatccgctgataccacatcatctgcagcaacagtttgtcctcccataaacagtacactcgcgattaaaacagaagcaaccccaacactatatttgcggataccaaaacgttgctcctcacaaccaaatatactttttttcataatttctctccctaaaatgtttaatttctgtaatatggatgttgattagcatccccactttgtccaattacaatcgtatccacagttactacttctccagaataaggatttgctgtcccagcaggaataacaataaaagctgctcctcccacttcataaataggattaaaaatgcctccaaagaaaacatttccttcaattgtccccgaaacaactgaatatgggtcagagtcaccagaaacattagcttgaccatttgaatcaactgttacagattcccctaaatcgttgctccaagtccccgcaattgttgaaaaatcaccattagcaatattttcaacactgatagatgaagcggttgttggtgttgtcgattgagagttttcttgtgtaccaacttctccactctcagcaactgacctgtcattactactatcttggctattgggtgctgaaattgatgaactcaactctgtgcttgatgaatttttagtcactttctttttctttatgctactcttgcttacttgtgttacttttgaatggcttgtgctaacttgagatgacttttccttttttgaacaagctccaagtaacaagactgagcagagtaatgttacagttattttacaactttttttcataaaaaaatctcctagacatttttcataaaatggtgataatagctgatttacggctaaaatcatcaccattagttattagaatcggccaattctgaaaaatattataaagtatatatctgtaaaagtcaatacaaaaatgtaatatttgtaacatttttgaaatattttataatatttaataaaaaaaacacaatgctactcttgataatcaagatgttaacattgtgttttctatatttatctctccgagagttctttcatgatacgggggagttctgcgctaattgtcgttggtaaaacaacataagcttggtcgctgagttggtcagcgatgtaggaatgtaggtacgttgctgtagcaacactgttaaagagattatctttaaactgggcgacaaagcctgcaatcatgccacaaagcgtatctcccataccacctgtcgcttggtaaggaccgccaacagttagctcgccgacttgatttccttgaatgattttagtctgatgacttttagccactaagacggtcttttctggaaattcttgcagagctactttggtgttttcgattgtctggttcgaaatagcgattcctgataatctttcccattctttttgatgcggtgtcaatatgagatgatttgttttgactgtgattggcttagcttttgccaataaattcaaagcggagccgtcaataatcaaaatctggtgttcagaaatatgttccaaaaccatttgaaacacggtttctgctttgctattttcccctaaaccaggaccaatcaaaacgacatcagccttggtcaaattttcataaaatagctccttatcatcacaatcaaaagccatagcttctggaagatggctatgaagagctgcgatattgtcacgctcagtcgccacagtcactaatccagcaccgcttttaaccgtggctaaggcgctcatgataatcgctccaccataagggtaaaatccaccaattaaaagaacacgaccgtatgttcctttgtgagaatgtggctggcgctttgtaatcacttgacgcgccaataattcatcaataatcatgctttcacacttctaagggcagattgatatgtttgttccataagcattgtaatggtcattggaccaacgccaccaggtactggtgtgataaaacttgcaagtggttcaacttcgtcaaatttaacatctccaatgagcttaccattgtcatcacggttcataccgacatcaataaccactgccccttctttcacaaattctttggttacaaaatgtccttgaccgattgccacgattaaaacatcagcttgttttgtcacgcgcgccaaatgacgtgtacgagaatgcgccaaggtaaccgttgcatttttgtccaataatagctgcgccattggttttccgacaatatttgaacgcccaatgatgacagctgttttaccttctaaatcaatgtcatattcacgaagtaattccataatgccagctggcgtacacggtaccatgacaggacgtccattccaaaggtgtcctgtgttgatcgggtggaaaccatctacgtcttttttagggtcaattgctagaatcacacgcttatcattaatgtgtgcaggaagtggcaattgcaccaaaataccatggaaacggtcatcttcgttatattgttcaatcacttgaatcaattcttcttcactgattgattctgaaaggcggacagtttcacttaaaaatcctgctttcttagcagaacgttctttatttcggacataaacttgactagctgggtcatcaccaacaagaataacgaccaaaccaggcacaacgcccgtctcagcttttaatttttcaactttttcaactaattcagtctgttttttgacagctaaggcttttccatctataattcttgccatatcattctcccaaattgtatttcttccattataccagaaaacagcactatattctatttttcagaaaattctttaaaatattattgatactgtcttttatagctacaaaaagcttgcccaaaatgagcaagctttctcttgttagtttactttgatgttttatgcatttcatctttgactgggcagttacagtcgcaatcaccacaagaaccttttcctttgatgaaactacgaaagcccataaacaccgcaaatgcaataattgcagcaataataatcgttgccatagcgttattctccagccatttctagattatccaaagtaatcactttttctttaacttgtcttggttttctaacgataaagtaaataatagcaatcaacaagataacggctacaatcgtccagaatgtgatgcctttgccatagaaaacaacaagtccaagttgatagataatcaaactaaccacataagcaagtcctgtttggaaaccaatcgcaccgattgtccattttgcatctcccatttcacgtttgatagcacccattgcggcaaaacatggcgcacagagtaggttaaatgtcaagaatgaataagctgctaatgatgtgtaatccaattgcaaagcatgatacaaaccactagttgtgctgtcattatacaagacaccgaatgttccaacaacggcttctttggctgcaagccctgtcgcagctgcaacagtagctttccagtcaccaaaaccaagtggttggaaaatccaagcaattgctctaccaagagcagcaaggattgaatactccgtatcaacagcttggaaagcaaaatcataagatgacataaaccagataataaccgtcaaactgaaaatgatggtaccagcacgttttacaaaactcatagctttaccaaaggcataacgcaatactgaccatacttttggcatatggtaagctggcaattccatgataaatggactaacatagcttccaaggaaacttgttttcttaagcgcaatccctgataaaataattgtcaagaaaccgatgaagtatgtagatggcgcaacaaatggattatctgggaaaaatgctcccgcaatcaaagcgataatttccaatttagccgagcatggcatgaacgttgctgtcataatggtaatacgacggtcacgttcgttttcaatggtacgacttgccataatcgcaggcacaccacaccctgtcgcaatcaacatcggaatgaaagattttcctgacaacccgaagcgtcggaacacacggtccatgacaaaagcaatacggctcatgtaaccaatatcttctaaaatacccaaacagataaatagaacaaagatttgtggtaagaaaccaagaaccgtaccaacccctgcaacgattccgtcaataatcaatgattctaaccaaccagatacatgcaagtaatctagaccagcttgtacccaatttggcactaaatcaccaaagagaacatcgttcacccagtctgtccacattgttccgactgtttgaatagataggtaataaaccaagaacatgactaccgcaaaaatcggcaatgccaaaatacggtttgttacgacacggtcgattttatctgaaatcgtcatcttgaaattgctatcttggttttgcgccattttagccacacgttcgataaattcataacgttcattgataacgatagattcagaatcctctgtgaaaatttcttcggtgattttaatcacttcattgatttcacctttttgaaattctgacaattctacttcattttgaaccaaagcatcacgttcaaaaagtttaatagcataaaaacgtgcagaacgttctggaacaatatcacctaaaatatcaataatttgtttaattgccgcttcaaatttatcactataagtaggatattgaatgatatcaacggtttctttagtagtatgagctgcttttttaacagctttctcaacgccgacatttttaacagcgctagtagaaacgactggaactccaagttgataagaaagtttatcgatattaatcgtttttccttgacctttgagggcatcgctcatgttaagcgcaacagtcacaggaatccctgtttcaatcaactgcgttgtcaaataaagattacgttccaagtttgtcgcatcaacaacattaagaatactgtccgcatgattactcaacaaatagtcacgcgccactttttcctctggcgtataaggtgacattgagtaaatccctggtaagtcttgcaccttccaatcactgtgctttttaacggtaccactttttcgttcaacagtaacaccaggccagttaccaacacgttgacttgttcctgtcaataaattaaagagacttgtttttccgctattcggattcccaattaaggctatctctgtcatttcttctcctcactatctactttcacaacactaatcatctgcgcttctgatttgcgtaaggttaactcgtaaccacgtaaactaatttcgatagggtctcctaatggcgctactttacgaaggtaaactttggtatggcgtgttaatcccatgtccataagacgacgttttgcttcattaatagcataaataccatccacataagcaaattctccaactttcaactctgaaaggggcaaagtttcaagttctccttcttcttcagtaacatcaatatgatttaaaattgactgatcaaatgccaaacggcttgatttaagcatgacaattgcactggttggtgtttttgaaacgacttttaacgaagcaccaacttttaaccctaagtttgataaatgtcgaacactttcatcaggcaaatcaacactaacgactgtgtagggaatatcaactttagcattttgcaaaatcaaaattcttgacctcctcgtaattttttgataaaatatttgaccttccgcccgattcattatatcataaaaatagggcaaattttctataaaaattaattttttctttaattattcaattaattagaattgttctaaataagatgtttgtctatttagaatcattataatatagatgttttcattcttgtttcaatcatttacatttttttaaaaataactaaattctaaaaattaagtgtgcttaatatataaaattccactcattttaatctaattaaatatccatttttacctatattcaacttcttccagaacaagaaaaacctcagttgagtttatgcactcaaccgaggtttttttattctattataaaactttactcaagaaatcttttgtacgagcttctttggtttgttcaaagacttcttctggcgttccttgttcaacaatgacacctccgtccatgaagataacacggtcagctacttcacgtgcaaatcccatttcatgggtaacaatcgccattgtcatcccagatttcgccaaatcttgcataacaccaagcacttcaccaaccatttctgggtcaagcgctgatgttggttcgtcaaagagcaagacatctggatccatagcaagtccacgcgcaatcgcgatacgttgttgttgaccacctgacaaactagctggataagcatctgctttgtcgcgaagcccaactttatctagcaaatcataggcttttgcttctgcttccgctttagagacaccttttgttttgattggtgataatgtgatattttcaagtaccgtcatatttgggaaaagattgaactgttggaaaaccattcccattttttcacgcattttgaaaatatcatttttcttatctgtaatatcaacatcttcaaaagtaatcacaccttttgttggtgtttcaagtaagttcattgtacgaagaaatgttgattttcctgaccctgaaggtccaatgataacaaccacttcaccagatttaatatcaaggtcaatcccttttagcacttcattttttccgaaatatttatgaagccctttaattgaaataagcgtttctgacattagttgctacctccgtttcccatgcgtttttcaagtcgtttcactaagaatgacatcacagttgtcaccatgaggtagtagaatgcagcaaataacaacggtgtgattggcaaatatgttgctgttacaaccgattgggcaccattccacaattccataacaccgatagtttgaagaagtgaactatctttgataatggtaataaattcattaccaagtgctggtaagatatttttgagggcttgcggcaaaatgacataacgcattgcattgactgggcgaataccaagcgaatacgccgcttcaagctgtccttttggcactgcttcgataccagcacggacgatttcagaaatataagctccgctatttaacgaaataataatgatacctggaagcaaacgcgaaaaatcaaggtcaagaacaccaaagccaacgattggcgcattattaaagtgcatccaagcaaaggcaatcatgatttgaacgaccattggagtcccacgaaagacccaaacgtaaaaactagcaatccaatttaaaatttttatatttgtacgtttaactaaagcaaccaagataccaatgatcgtcccaaagaaaacaacacacgctgaaatcataatggttacaaggacaccatagttaaaataagcccaatattttggcaaaaatgaaaaatccatttatttctcctataagcaataatcaattaattataacacagattgaataaaaataccaatgattcatttttctgaaaacagacgtaaacacttgatataacagcatttctagcattttaataaacaaaaaaataaaaagctcgcagtttgcgaactttttgcaattcaaaatagcaatataagaaaacgttgaaaccacacttaaacagggctttacaaaaaccttatactctgtcctgaatttttctttattttagtaaagaaggtcgtaaatttccattgcgattaaatcgatgctatcaaatgagtaagactcacgcgcttcaacatcacgcaaagtgaaaactggaccattttcagggtcattgctgaatgacacttctgccacaacgacaccatcacgttcaaaattacgtttaagattactactatcagttgtcattaactcaagacgattgataattctcaccaaatgtgattccatgactattctcctcttcgtttattgtccatactattttaacataatttcctacaaacaaacaacaaaggaatgtattttcttgcttttatcaaaaattcctgtcaaaagtgccattttccagtgattattatcccttaaattgcttttagtgaattgtacataattgctttgatagaatgcatacggttttcagcttcttgaaaaattattgaactgtatttttgaaaaatctcatcggtaatttcaagttcagcaagaccatatttgtcataaatttcttgaccaatttcggtattaaggtcatggaaagctggtaagcaatgcatgacaatcacatcaggattttcagttttcgctaatagttctgcattgatttggtaaggcaataagaggtcaatacgttctttgaaatcaactttttctcccattgatacccaaacatcagtgtaaagcatatcaacacctttaactgcagcaaggtcatctgtaatggttaattcagcaccattgttgtatttttgagcaatttcaataatttcagcttcaggttgcaagctggctggcgcaataattttaacattgacaccaagaattgccgaagtcacaagcaaagaatttgccatattattacgcccatcaccgacataagcaatcgttaagccttctaattttccaaaaacttcttttaaggtcataaaatcagcaatcatttgtgttggatgccaagtatctgtcaaaccattccagactggcacaccagaatactcagccaaggcttcaacatcttcttgtttgaaaccacggtactcaatcccgtcaaacatcgaaccaagaacttttgccgtatcaatgactgattcctttttaccaagttgaatctcgctactaccaagataagtcacgttcatgcccaaatcttgcccagccaccgtgaaagctgaacgtgttcgtgtacttgtcttttcaaaaataagagcaatgttcaacccctctaaatatttatgaggaattcttttctttttcaactctttaaatttcaatcctaaatcaatcaattcaaccagttcttccttagtaaaatcaatctctttcaaaaatgaatcattaatagccatacactcgtccatcctttttctttgaataatatacctaattttagcataattatacattttgtcaagcaaattttgaataaaaataaaaaaatcatctcccccaaaataccaccacatttgtcatttatatttgacatgtcatatataatgtactatattgtaattatagaattatagttatagtagaaagaaaaaatgaatcgcgttagagaatttagattaaatctgggaatttcccagttagcattagctaaacaaataggtgttgcccgccaaacggttaacctcatcgaaaacaataaatataatccgtcgcttgacctttgtatcaaactagcggaggcactgcaaactgatttaaacacacttttttgggagaatagacatctataattttgggaattttaaaggagaatcattatgaaaacgaaaaaaacatcactttggctaaaatttattaaacgtttctacggaattaatggcgaattagacgaatatcgcgaacaagaagttaaccgtatcggcaataaactgtttattggtctctttttctttgagttattcttttctactattattttactcatcaaccaaacgatagcgaccgccgcttttctctatattaatctcttcgtcctcatttttgttattcctattattcttcttgttatgttgaccaatcgtgatttgcaaacatcattggaagtccctaaaaatgaagtcgaacagacacggcagaaagctcgcaaaaaaggctggttagctggtggaatttttgcactattcatgctcgtttttaacgcttttagcaagtggcaagagggagaaaatcctttagaactcttcacaaatcctcttggacttatcgcaatcatccttggtgggataatttttggtgctgctatggggtctatggcagccagtcagattgaccctgagaaagaatagcactcttagcataagagtgctaattttttaatgctttttacttgatttctattaacctagtgctataatagaatcatgaagtttgactatctttgacctttattgtcaatgtcaagccattacgaaaggagggtattttatatgctctgtcaaaattgtcatttaaacgaatcaacaattcatctttatacaaatgtcaatggtcagcaaaagcaaattgatttgtgccaaaactgctatcaaatcatgaaaactgaccctaacaatactattttaggtggtttaggagatgcacaagcttcttccacacaaaatcaatctactggtatgaatccttttgatgatttcttcagtaatttgaataatttccacgcattcggtggacaagatttccaaaatacgcctccaacacaatcaggtggtggaaataacggcggcaataataacaattatcgtccaaacggcgcagctagccaacagcaacaacaaaaaggtttgctagaagaatttggtatcaacgttactgatattgctcgtcgcggtgacatcgaccctgtcattggacgtgatgccgaaatcattcgtgtgattgaaattcttaaccgtcgtaccaaaaataatcctgttcttattggtgaaccaggggttggtaagacagccgttgttgaaggattagctcaaaaaatcgtagatggtaacgttccacaaaaacttcaaaataaacaagttattcgtcttgatgtcgttagccttgtgcaaggaacaggtattcgtggtcaatttgaagaacgtatgcaaaaactcatggaagaaatccgtgaacgcaaggacgttattctcttcattgacgaaattcacgaaattgtcggtgctggttctgcaggtgacggcaacatggacgctggtaatattttaaaaccagcacttgctcgtggtgaacttcaattagttggtgctacgacactcaatgaataccgcattattgaaaaagatgcagcgcttgaacgccgtatgcaacctgtcaaagttgatgaaccaagcgtggaagaaacgattacgattcttcgtggtattcaaaagaaatacgaagattatcatcatgtcaaatacagcgatgatgcaattgaggctgccgcaaatctttctaaccgttacattcaagaccgcttcctcccagataaagccattgatttgctagacgaagctggctctaagatgaatttaacccttaactttgttgacccacaagaaatcgacaagcgtttagtggaagctgaaaacctaaaaacacaagctactcgcgaagaagattatgaacgcgcagcttatttccgtgaccaaatcgctaaatacaaggaaatgcaacaacaaacaatcaacgaagacgatattccagtcattactgaaaagactatcgaagctatcgttgaagaaaaaactaacatccctgttggtgatttgaaagaaaaggaacaatcacaattaatcaatctcgctaatgatttgaaaacacacgtcattggtcaagatgatgccgttgacaaaattgccaaagccattcgtcgtaaccgtgtcggtctcggtacaccaaatcgtccaatcggttcattcctctttgttggaccaactggtgttggtaaaacagaactttctaaacaattagcgatcgaacttttcggctcagctgacagcatgattcgtttcgatatgtctgaatacatggaaaaacatgcggtcgctaaacttgtcggagcacctccaggatacgttggttacgaagaagctggtcaattgacagaaaaagttcgccgtaatccatactcactcatccttcttgacgaagttgaaaaagcgcatcctgatgttatgcatatgttcttgcaagttcttgatgacggtcgtttgactgacggtcaaggtcgtacagtaagcttcaaagatactattattatcatgacttctaatgctggtactggtaaaacagaagcttcagttggtttcggtgctgcttgtgaaggacgtacaaattctgtccttggtgaacttagcaactacttcagtcctgaattcatgaaccgtttcgacggtattatcgaatttaaggctcttagcaaagacaatcttctccaaattgttaaccttatgcttgacgatgtcaataaacgtctagcaactaacgatattcacctcgaagtcactgataaggtaaaagaaaaattagttgaccttggctacgatcctaaaatgggagctcgtccattacgtcgtactatccaagaccacattgaagatgccattacagacttctatcttgaaaatccaagcgaaaaagatttgaaagctgttatgacaagcaatggtaaaattatcatcaaatctgctaaaaaagttgaaaaagaggaaacaaccgtttcagcagaatcagaataatgaaactctaaagagtttggaacaacaatagttccaaactctttttctttgcttcaacgacttctcagcaacaaaaaacaatacttgatgatattccagatttcagcaaacttctctgctatttttataatgcataaattgtcacaaaattaaaatcgaaatattccgacaactttatagaaaaaagttcatttttttagtataatatcaccaatagacactcgtattaattatttcggtctccactatttctatcacatttttcataggagaatatcatgacaaatccaactttcggtgaaaaacttacaactgttgattacaaggcacgctatggtgtttatgccgttattcccaacgctgataaaagccagattatcctagttcaagcacctaatggttcttggtttcttcctggcggagaaatcgaggcaggtgaagaccatttttcagctttaaaacgtgaactcattgaagaattgggcttttcggctgagctaggttattactatggacaggcagatgagtatttttactctcgccaccgtgacacatacttttataatcccgcttatatctacgaagtgacacattttgaagaaattgatgctcctttggaagacttcaacaacctatcttggtttccaatcgatgaagctattgaaaaactaaaacgcggtagccacaaatggggcgttgaagcttggaaaaaaaatcatcactaatatctcttattctactttttcactcaaaatagtgttataatagtggtagaaaaacacacaggaggagatctatgaggttaatcaacacaacaagtagtcattctgagctagttcgtaatcagttgcgaaatacggacgccaagctcgtcgagacctactctgcaggaaatactgatgttattttcacacaagcgccaaaacactacgagctgttgatttcaaacaaatatcgcgctattaaagatagtgaaattgaagccattcgtgaatttttcctcaaacgtaaaatcgacaaatcaatcgttcaattagaccaactaaaaaccttgcatacagcaaatctaattgaaatttcatttccaacagctcactaatcaggtcttcgcaacctgattttttgttgctttggtatgtaaaaaacgaactcaaaaatttgagttcgttttttttgtatttgttaaacagtaaagttatgttattttgctttaacttcaaatccttctgctactgcttctgggaagtttgcttcaacgatttcagcacagtggtcacaaatagtaacaccgtatgaacgttctttagctgttgggtcaacacgacggcaacggtcacaaacttgtccgtcagcatgagcaactgtgaacgcaacatcatcaaagactactgcgtcagcaggcgcagcttcatcagtaacagtcaattgagatacaatcaacaattgagcaacgtcactatcaagtgctgtaagaagagttttcacttcttcgctagcataaattgtcaaatgagcttccaatgatttaccaatgattttagcattacgagcttcttccaaagctttttgagcttggttacgaagtgtcatgaaggcatcccattcttcaagaatattttcttgccctgcaaagacttcagcatctggtaattcagacaattgaacaaattcttctggttcgaattcgaggtatgaccagatttcttcagctgtgtgaggaagaattggtgtcaacaatttagtgattttaaccaaaatatcgtagaagactgtttgcatttgacggcgagcaaggttatctgctgcttcgatgtaaacaacgtctttagcaaaatcaagatagaatgctgacaaatcaactgtgatgaagttcacgacagctttgtaaatcgccatgaagtcataggcttcgtaagctttgcggattgttgctaccaattggttgaatttaacagtcatgtatttatcaactgaacgcaaatcttcgtaagcaacagcatctgtatttggattgaaatctgctgtattagcaatcaagaaacgaagtgtgttacggattttacggtaagtttctgatgtttgtttcaaaatatccattgagatacgaacatcattgctagaatcaacactagttacccaaagacgtaaaatctcagcaccaaattgtttttcaacatcacttggaaggattgtatttccgagtgatttagacattttttcacctttaccatcaaggacaaaaccttgagaaagcacagctttgtaaggagcgtgtccgttaacggcaactgaagtgattaatgatgagttgaaccaaccacggtattggtcagacccttcaagataaaggtcagctggatattccaaaccttcgcgagcattcataacaccattccatgaagaacctgagtcaaaccatacgtccatgatatcagtttctttagtgaattcaccatttggtgaacctggatgagtgaatccttctggaagaaggtctttagcctcacgttgccaccaaacgattgaaccatgttcagcaaacaaatcagcaacgtggtcagtcacttctttcgtcatgatagctgtaccatcttcagcgtagaagattggaagtggcacaccccatgcacgttgacgtgagataacccagtcaccacggtcacgaatcatgttgtaaagacgtgtacgaccccattctggatagaatgttgtgcggtcaatttcatcaagaatgtcttgacggaatttagaaactgatgcaaaccattgtggtacagcgcgccagatgattggtttcttagtacgccagtcaaatgggtatgagtgagtgatgacttcgctagcaagcaaaaggtcaccaagtttttcagtaacagttggaacaactttatcgtagaattgaccttggaaatctagaccagcattttccatcatgataccacgttcgtcaacagtaacagcaacttcaagattgtatttaacaccaacattgtagtcatcttcaccaaaaccaggggcagtatggacaacacctgtacctgaatcaagtgtaacgtggtcacccaagataacaagttcatctacttctgtatcccatgggtgttctgtaacgatatattcgagttcagtacctttatgtttagcgagaacttcaaatgattcccaaccaaatttttcagctaagctatccaaaagtccttctgcaacaacgaattttcgatcatcattagctggtttcacaacaacgtaatccatatcaggaccaacagtcaaaccacgtgaagctgttactgtaaatggtgttgttgtccaaacaacgatataagtatcagtatcaagcacacctttaccatctttaactttgttagcatagtaaagtgatgttgaatcgatatcatggtattcgatttcagcttcagcaagtgctgattcagatgaccatgaccagtaaacaggttttgcaccacggtagatgtaacctttatcagccattgcaccaaagacacgaatttgagcagcttcgtattcaggaattaatgtgatatatggattttcccaatcagcagataccccaagacgtttgaaatcttcacgttgtttatcaacttggctaagtgcgtattcacgacacatttcaaggtattcagtcaaaggaatttctttgcgtttcacaccttttttagccaacacttgttcaattggaagtccgtgtgtgtcccaaccaggaatataaggagcacggaaaccagacattgattttgaacgaacaataatgtcttttgaaattttattcatggcgtgaccaacgtgaatatttccgttagcgtacggaggtccatcgtggagattgaaagaaggtttgccttcatttaattgttgacgtttagcatagatatctgcttcttcccattctttttgccaatttggctctttgtttggaagtccagcacgcattgggaacgcagttttcccaagattaagcgtatcttttagtttcatgactactccttataaataataatatttaactatcattgacattgccaataacagaaaatgacctaacatataaatggttaaacaaaaaagccttcgtctcaaaaaggacgaaagctcgtggtaccaccttagtttagaaacttagtttttaaaatctaaatttccctctttaactcgtaaggtgagtttgcccttttaccctacttgattcaggtaaaaatgttagaaaaggataattgatacccaagtgattgcaggtctcacaccatcgcctgctcgctgtaaatattgactatcaaccgtgtttttcttattcttcgatatttaatttaaatgtttgtgtttcgttaagattgatttcaggatctgcttcgttgtcatctacaatagcaattttttgtgtttcttcaaggtgtttgttccctgcttcaacacgacgttgcaattcttccatttcttctggtgtaaattgacgtgttgcatccattgacaattcatcatctgtttctggaacttcttcttccaaaactttttcaacaacttcacggaaagcagcatctgagttttgaaggtaaactgctgttggttgcaacaattctgtccattctggtgaatttgttaaaccaagttgcccttcgatagctgctaccaaacgttggtggaatacacgtgtttgacgtttcaaatcttctgtttccacagcaacacgtttagcttcgtcagttgcatcgcgtaaaatttgattagcttttgatttagcctcatcaataagatgttgtgcatcatagttagctttgctaacaaggttagcagcttcatcgttagcagatgttttaactttttcagctgtttcttgtgcaaggataacagattgactcaatgattctttcatttcatcgaagtaagctaatttatcttctaaatctttgattctgttttcttgttcatgattacgacgaaccaagtcttcataatcatctacaacaatatcaagaaattcattaacttcttcttcgtcgtaaccacgaaattttaatttaaatgttttatctttaatatcaagtgctgtaagtgccattgatttctccttatttatgtatcatcttatctacggtcaatttacattttccatttttggtgagaccattttcacttaaaatagaaaagcgaccaaatcctctaacactaatcaaatctccaacttgaagcatttctgaggctctatcaactatttgatagttaagttttactttatcagtttctatcaactgcactgcttgacttcttgaaagcttcaaaactgttgcaagaactttatccatgcgcatactagaaaccatgatgtccagttgccgactatctttctcacctgcaattaactgttccagaggaatttcttttagtgaaacgctagccttagcaattttagtcacattagctctaaagtaatcagccatattttgcgttaccaaaagctgcgcataaccagagtcaactaaaatatctccgataactgttcgtttaatcccaagcttatggagtaaagtccccataatctgagaatgtgtcagctgattaaattttgaattgtaattcacctcaagcaaggttaattcaaaatcctcaggattaaactcataatagtcaggtgccacaataagtcgagcgtactcagctggataataatcactcgaaacaaaatagtgcaatcctcgattgccaataacgctttttgcgatatcaacttggcgaggatttagaaaatctgttaaagcatatgcataagtttcttcgacacgacgagcaaggtcatcaatcttttcaataaaatcatactcatctggtcgaaaatgctgatataaaccctttttcatcgccatgttacgcaaaaatcatgataagaacacgacttaaaacgtttaacccaattactacggctaaaatcgtaaagtctaatcccatgaattgaagattaaaacggcgaaaaggtctaataactggttcaaccagttgccccatggctcttccaaaccaagtgttgtaagctcctgggaaccatgaaagtaaagcatacgcaaataacagataagagtaaaactgaattagtcttaatagtacaattaatacaaaaatcatatattagcgtctcttcatgtcaaagtcaaaaccgatgtcttgcccgttatttggaacagcaagttcttcaacattaacaataacgttagaaggtgtcaataagtacattgaactaccaactttttgaagacttccataaagaactttacttgcaccatcaataaagtcaaggcaacggcgtgcttgtgcatcaagcatgtattggaaatcaatcaatacacattcattaacaatcaaaaggtcaacaatttcttgagcatcctcatatttacgaggaaatttcaaagcaattgtcgttgttgcttgattagcacgtacttgcatttgttcttcacgacgttgatttattgaacgaacaggttgattttcttcaactgctcgtctttgttgaggctgttgtggacgttgacgagctgctccaccaccttgaacttgctgagttctaacattttgaactggttcagcacgtctttgggcttgttgtggtactgcttctgcttgctgttgaacacgtgggcgttgagcctcttcttcaacagtttcttcaacatcacttacctcatcagtgtcgaaataagaaattagtttgtcaaatttatctttaaatgccatcttttgttctcccgttatttaaagaatgatgttccaattctaacaaaagtcgctccattgcgaatcgcaattttgtaatcaccactcatccccatacttaattccgtaaaaggcatatgaggtaattggcgagcttgtaactcttgtctaagttggtttgcttttccaaaaatttcttcaatctcactttcagaagcttctttcggagccattgtcatcaagcccacgatttccactttatcaaattcagagattgcggctaaagcttcgtcaatttccgaaactttaaaaccgtgtttgctctcttcctctgaaatattaacctgtaagaaacatttgatagtatgctctgctcgtttctgaatctctgaagcaagtttgacagaatccaaggcatggaaataatcaacaaagttaatcacatttttaacttttcgacgttgcaaacttccaattaaatgccaagtcaaatttctatcttttaaggcttcatatttatcaagaaacatatcgaccctattttcaccaatatgttcaatacctgtgtcaataagacgagcagcaacaccactatcaacatacttcgtcacggcaataacattgacactttctttagaacgattggcttgttgcgcagcctgcgcaacttgttcaaaaacaaggtctttatttttttgaaaatctgtcattaacgatttttaaagaatggtggtgtttctagttcatcatccgcatcatcattggctgtaaatgttgacattgtcaatttactatctaattcaccttctgttggacgtgcaatgttgtcacggcgaagatcccagttaccaaatgaattttctttttgttgagattggttagctgctggctgttgtgaagctggcatagcgtggctttcacccatatcatagtcaaaacttgaacgacgttcaaatgttgtttgatttggttgttgtgtacgttctgaagcgtattgagcacctgctgcttgttgtgcattagcttgagtaaatgaacgagttggttgttggaatcctgctgcttgctcagcgcgatcttgacgaacacctgttgcaacaactgttacgcggatttcatctttcatcgtatcatcaatagatgtaccaagccagatattaacacctttacctgctgcttgactaatgatttcagaagcttcttctgcttctgtaagagtcatatcaagtccaccagtaacgttaacgataacatcttgcgcaccatcaattgtagtttcaagaagtggtgagaagattgctttacgagcagcttctgtaatacgttcttcaccagaaccaataccaatccccataagggcgttacctttgtttgccataactgttttaacatcggcaaagtcaaggttgataagaccaggacttgtaatcaagtcagtgataccttgaacaccttgacgaagaacattatcagcttcgctaagcgcttcaagaagaggtgttttcttatcaacgatttcaagaaggttattatttgaaatgataagtaatgtatctacttgttcacgaagttctgcaattccttctgctgcaaagttaccacgtttgtttccttcaaaaccaaatggacgtgttacaacagcaacagtaagagcacctaggcttttagcgatacgtgcgataactggtgcagcacctgtaccagaaccaccgcccataccagcagtgataaagaccatatcagcccctgtaagagcttctgtcaacacttcttcactttcttcggcagccttacgacctacttcaggttgtcctccagcaccaagtccacgagtcaatttagggcctaactgaataacagtttcagctttagatgagctcaatgcttggatatcagtgtttgctgcgataaattcaacaccagcaacaccttcatcaatcatacggttgatagcgttgcctccgccaccaccaacaccgataactttaataactgcaccttgtactgatgctgtgtcaaatgaaaatgccatttttattcctcacttattgtttagtcaaacatacttccaaaaataccacgaacacgttcaccaagttttggtcttgattcttcttgtttttgaactggtggaacctgagtaggttgcggtactaggttatcatttgctggtacaactgggtcgttattatagaccactcgtggttgtacttgcggttgtggttcaaaatcaactggtttgcgtcgaagaagttcttcgccagaaactgctcgttgcgcaatcacatccacttcactcattgtaccaacgtattcaacaaggctgatgacgttagcaaacattgggttgcggataccaacttgatttggaacatgtagtttaactgttgttccaaaaatctcttgagcaacttcaaccacacctggcatgattgctccaccaccaacaagaacgatacctcctggtaagtcgagcaaacgtccacgttccaaatcttgtttaacacgatctaggatgtggcgtacacgtgcagaaataatttctgacaagtaacgctcgctaactgagataggtgtatcactaccaacgacatcaacttggacagtttctgacaaacttgcttcctctaggtcagcttgtccaaagttgaatttaagggcttcagcaatctgcatagatgttttcaaaacttttgaaatatctttggttacatattcaccgccctctgggtaaatgttagtgtattgcaattcttgtgcacgcatagaagcaacagtcgtttgaccgccacctaaatcaattacagtagcaccgaattcgcgttcaccttcattaagaactgattttgccatagcaagcggtgtgatgataatattttcaacactaatgcctgcacgttcaactgtcttacgaagattatgtaagatagtgcttggccctgtataaatcaaaccacgcatctctaagcgaatccccatcatgccacgtggatcacgaattccttggaaaccatcaacgataaattcttcaggaatcaatgagattacctcacgttctggagtaatactttttgttaatgctgatttaacaacactatcaacatcttcatctttaatttcttttgattcactaggtactggaatcatcccttgggtgggttcgatttgaagcaagttagctggaagacctacgttaatcttatcaattgtcattcctgctttttcttctgcttgctcaaccgcttttttaatcgcttcagcagcagcctcaatatctataataatcccgtcttttactcccgtactgggaacattactcacaccaatcacgttcatttcgccagaaacaaattctgctactagaaccttaatcgagcttgttcctatatccaaacctgtaaaaaagccatttctagccattcactcgacctcactatctttccaatcatttactattctaaaatctgtataaaatcagaattattcagaaaatattatatcataaaaaaacgtaaaatgttatcattttacgttttttgttatagaaacttaattttattgttgaccaacctgcataccagatgtcatattattcggattttcctctgtagtagggttattatcgctagcaccatctactgcaaatgcttctgttgatacttctgtatcacttgattctgtctgagtttcctcactagattccgttgttgattcggtatcactagactctgtattttcatcacttgattctgaactagcactttctttttcagcggcagcttcggactcaatagtttctgtcgttgtgtaaataccgacttccatatcaacaatgctggcttctgtcagatttcccttaattttcgtgtagtaaggtaatttctcaacaatttctgacaatggtacacgaacagtattgccatcatgcatttccaaaagaagtaaatcagctgtcgtcgaagaattcgcagagctaacaatttgaatttggctaaccaaatctttatctagttttgaaaaggcttttatcaatttttgaatatcgctttcagaagaaagattgatagtcaggaaagtatcaggtaattcagacgccccaacaacatcaaggtgagttccgttttcaagaattggttggtagccatcatccgtctgggcataagccacaatatcatattctttcacttttatcgtgaatttattcggaaaatgataaacgattttagcttctttgaccattttatcgtttttcaaaatacttttttcatacgctgaatggttaaaaatcagcgagaagaaataatctgagctttttatgcccgacgcagtcaaaacagcatcagaagttgttgttgatgttcccgaaactgtgactgttttttgcttgctaataggcgttaccaaaaagagcgatattagcaaaactgcaccagcaacaataagaacaggataagcacgacgtctcgctttttgaagtggcgtgagctcctttttctcttttttctttttttcttttctggcttttttagcttgttttactttttgttttttctcttttttagaaacaatttcttgttcgtcagcatcaccgttggttgtcgctttgtcagctttcttttcagactgggagtctttttcttcctcgtcgtcatcttcttttttgacatgctgcgtgcgttctaaacgtaatttttcttgacgtttctttttctcagcttcttcagcttcttttttcttcagaaattcaatattgcgtttttgccattctgtcagcgcaagcttttcgtcattttgagttttagattcttttttatcttgctctttctcttttgtcatttacattccttttgcggttttagagatgtcttgcgtgatgagatgataaaattcatcttgtgatttgatttcgtttgaagtcgccattgctgttttataactatcttcatgagcaaaaagttgagctaattcttcttcaagattaataaaggttaatttttcttcagcaagctgacgagcatagccttttttctcaaaataagctgcattttctaattggtcaccacgactggcttcttttccaagaggaacaatcaagtgcaatttgtgcattgcaaccaattcaaagatagtatttgaaccacctcgtgtcacaaccacatcagccatatccatcaaaggttgataaaggtctgtgacgtagtcaacacgatagaggttttgacttaaaccattcaaacgtttatcccctgaaatgttgataacattgaaatgctcgattaattcaggagtattagtgatgaaatcattaaaaacacgtgccccagcagaaccaccaataaacaaaagtgttttcaaattagggtcaaaatgattttttatctcttcaattttactgtcatcatagtcaactttactgccgacttttgtaatcgctccaacatgttttgcttttgctaagccttcagcttgttcaaaagttgtgtacattgttgtcgcaaatttataggcgattttatttgccaagcccatagacaaatcagattcatggacaaatacaggaacacctaacgtcttggcggcaatgactggcggaactgacacaaatcctccttttgaaaagagggcttgtggtcgaattttagcaatgattgccaacgattgtagaattccaaatgatactttgaaaacgtcaagcatgttttgccatgagaaataacgtcttaattttcctgttgcaatggaatggaaagtcacatcaagacctgatttggtgatttgttcatgctcaatgccatttttgtcgccaatgtaatgaacttcccaaccgtctttgataaattttgggataagaataaggttcaacgtcacatgaccaacggttccaccgccagtaaagacaattttcttagccatgtttattctcctttaatcgcttcaaaggttgcaataaattcgtcaccacgaacttcaaagctcttgtacatatcccagctagcattagcagggcttaagagaacaacatcaccagcttcagctttgtcataagcaatgcgagcagcgtctgcaacgtctttggcatcaacatatggaacatttgctttgtcagctgcacgtttgacacgcggagctgattcaccaaggataaccattaatttaaccccagtaatatctggaacaagttcgtcaaattcatttccacggtcaagaccaccagcgattaaaatcacttttgaattctcaaagcctgaaagggctttttgagttgctaaaatattagttgattttgaatcgttatagaatttaacaccattaatctcaccaagtgcttgaagacgatgttttacgccaccaaaatgagtcaaggtttctttgatagcatcatttgcgattcctgataattttgctacggcaatagttgccaaagcattttctacattatggctacctggcacaccgatttctgaagctttcatgatagcttcacctttgaaatacaacgtatcaccgtctaagtaagcaccgtcaactttttcagttgtagaaaatggaacgacttgggcagctgttttttgtgccaattcttttgccaaatcttggttgaaattaagcacgacgaaatcatcagcagtcatattcttttgaatgtcccattttgctgcaacatactcttcaaaagttccatgatagtcaatgtgagttggcataaggttagtaataacagcgatatgtgggtggaaagtatctgttcccattaattggaaagaagacaattccataaccaaaatgtctttatctgttgctgtttgcgcaacttctgaagcaggaaaaccaatatttcctgaaagaagacctgatttaccaccattgttcaatgtttcagcaatcatagttgttgttgttgttttaccatttgaaccagtgataccaataattggtgcatctgaaatcatgtaagccaactcaacttctgtgataactggaatgtttttttcgatagcgcgagctaccattggattatcgtaacgaattcctgggtttttaaccatcaattcaaagttttcatccaaaagttctagtggatggctaccacagataactttgattccttcttcaagcagtgattgtgcagcaggattttcatcgaatggtttaccgtcattgacagtaacgatagcgcccaatttttcaagaagtcgtgctgcggcttcaccagattttgccaaaccaagtaccaaaacttttttattttcaaatgttttaattgttttcatcatacatccattctaacattgcaagtataataatattctacatttatttaaggtgtttttcaatattttacgacatttcccgccacaaagctgaccaagatacgaaaaaagctgagtattcctcagcttttcttgctataatgctttttttcatctttcttagacggtaagcgatagacatctcttatggcgaagaatcctaaggcaaccatagcaagtccaagaaagatttctggtggtgattgcataattttgacaaaactcatagctgccaaaacgagcaataaagctactgctcccaccataccaatcatatttaaagtgctgcgaattgtttttggagccatgaaaaaataatacgaaacaatcaaaatagcaacgattaaataaaacattcataactcctttcttttacaattcaatttatcagttttaagcgaagacttgatttaatctaacaactttcctcgcttttttatttttaagctcggacctaaaacagtccactggacttcttcgcttacttatttttaggcgaagacttgatttaatctaacagattaaatcaatcctctgcagattttttcttcttagctgctttagcacgcaagtttttatcaaggatttgtttacgtaagcggattgattctggtgttacttccatgtattcatcatcgttcaagaattcaagtgattcttcaagagtcaagatacgtggagttttgataactgcagtttggtctttagtagctgaacggacgttagtcatttgtttagctttagtgatgttaactgtcaagtcattttcacgtgagttttcaccgataatcataccttcgtatacttcagtacctgggttaacgaagattgtaccacgttcttcaacagacatgattgagtatgttgttgctttaccagtatcgatagatacaagagcaccacgacgacgtccaccgatttcagcgttgataactggcatgtattggtcgaatgtgtggttcatgataccgtaaccgtgagtcattgaaaggaattcagttgggtatccgataagtccacgtgctggtgccaagaatacaagacgtgtttgaccattaccagttgattgcatatcaagcatttcacctttacgttctgataatgattggataactgaaccttggtattcttctggtgtatcgatttgaacacgttcgaatggttcgcatttcacgccgtcaatttctttgatgataacttctggacgtgatacttgaagttcatatccttcacgacgcattgtttcgataaggatagacaagtgcaattcaccacgacctgatacagtccatttatctggtgaatcagttgcttcaacacgaagtgatacgtcagtttgcaattcagcaagcaagcgttcttcaactttacgagatgtaacgaatttaccttcacgacctgcaaatggtgagttatttgccaagaatgtcatttgaagtgttggttcgtcaatgtgaagaattggaagcggttcaacgcaatctgttggagtgattgtttcaccaacgaagatgtcttccataccagagatagcaatcaaatcaccagcttttgcttcttgaatttcacgacgttcaagtccgaagaaaccaaacaatttagtaacacggaagtttttagttgtaccgtcaagttttgaaagagtaacttggtcaccaactttaacagtaccgcggaaaatacgtccgataccgatacgtccaacgaaatcattgtaatcaagaagtgacacttggaattgaagtggttcttctgagttatcaactggcgctggaatatggtcaatgatagtgtcaaagactggagccattgtgtgttcttgatcagctgggtcatctgaaagtgatgatgtaccgttgatagctgatgcgtaaacaactgggaattctaattggtcatcgtcagcaccaagttcgatgaagagttcaagaacttcatcaacaacttctgctgggcgagctgatggtttatcaattttgttaacaacaacgattggtgttaagttttgttcaagagcttttttcaacacaaaacgtgtttgaggcatagttccttcgtaagcatcgacaacaagcacaacaccgtcaaccattttcatgatacgttcaacttctccaccgaagtccgcgtgtcctggtgtgtccatgatattgatacgaacaccgttgtaagcaactgcagtatttttagcaaggattgtaataccacgttctttttcaagatcgtttgagtccattgcacgttcttgcaattctttacgttcgtcaagtgtgtgtgattgtttcaataattcatcaacaagggttgttttcccgtggtcaacgtgggcgataatcgccacgttacgaatatcttctcttaatttagtcatgattcctcgattttttaaatttattctaacttttgaattataccacaaatcctatgaaaaaacagcgataaaacaagtgtaaatgttttcagacacggatttagcttctataatatgtaaaaaagtattattttaataaaaattcatattgctgtctgtcttgaacatcgacttcaacttgacgatatttttctggagaatgtcctgtccattttttaaaaaacttagagaaatataatggatctgagaatccaatggaacacgcaatgacattgactggtaattccgtttttgttaataattctttggcattctcaatccgcaaatgtgatagatattgctttaagctgacgcctgttttttgtttaaataaacgagctaagtaagagcgattgaggttaaggtaatcagctatttcctgaactttaatcggcttatctaaattaagattgcaataagcgacagcttctttgatgtaagacaagtcatcttttttatcttgagattgatgatttgggaaattttcaatcaagaaagcaaataagtcataaatagcacgattagctttaagttctctcaataaaactggctcatttgttgccttaaagaattgattataaatcttgaccaagcgttcgtctttatcataatgaaacactggcttttcaagcaaagtcgtacaatcaagatagtgttcaatttttgcaccttgaacacctatccaagcatagcaccacggttcttttttatcagcttcataataaatttcctcacctggtttcattaaaaaggcatcgcctgttgataactcatatgtttgatgattaactttgaaaatccctttaccagctgtaatgtaatgaatcatataactttttctgacagcaggtccataaaaatgcccagaatcacattcctcatagccgtaattataaagcatcacatctacattttgataacagtcattagaataattaataattttcattactttctccaaaagtcacaaaattccataaataaaaaacgaaaatccatatctttatatattataaacgtttacaataattttgtgaattaaaaaaatatccattttactttaggaggttaacttatgtctttaactgacaaaatcacgcaaaaaatgatgccactggctacggctatttgtgaaaacaagcatctaaccagtttacgtgatggttttatggttgctttcccagccacaatgtttgcatctattatgatgattatccaaaatttacccgctacctttggattcgacaaatttttacctgacggtttcataacctttttgaatgatttttttggtccaatcggaaatgcaacaatgaatgtcacagcattatttgtcacttttggtgttggttatcattttgctaaatatcttaaatgctcaaagatttatgctggtgctgtgagtttagcctctttcctactacttcttccatttaaaacagtaaaaggtcaagtttacatgccgacagcaaagcttggctctcaaggaatgattgtagccatcctaactggatttttagcgacagccatttttgcttacctagaaaataaaaaaattaccataaaaatgccaaaacaagtgccacctgggattgcaacatcatttacgtctattatcccaagtgcggcatctctattgattttcaatactattcgttacctctttacctttacaagttggggcaacgcttttgattgcttatttaatgttttacaacgtcctttagttggtcttggaacaagtttgcctgctactctcgttgccgttgtcgctgcccaactcctttggtggtttggagttcatggtcaaatgattgttggcgccattactgagccactactgcaaacatcaaacctcgaaaattatgctgcctttcaagctggaaaaccgttaccgcacatcatctgttcaactttcatgggaattttcccacttattggtggtaacggaatgactctgggtgttgttctggtatcacttttcctagcacgctcacttcgcctaaaaagcacaatgaaaatggtagctgttcctgctttcttcaatatttctgaaccgattacttttggacttccaattgttttaaatccaatggtactcatcccttggattttggctcctgttgtgaccgtgttaacgtcatactatgctatttatcttggttttgttcctcgtccaattggtgtcactattgtttggacaacacctgttttcctttcaggctggattggaacagcctctattgctggtggtattttacaactggttaacgtggcagtttctattgcgatttggcttccattcatgatggcaattgacaaaacatatctcgctgatgaagctaatcctgtaacagaaagtgtggcagaaaatgattgaaaacaccgtattaagctactctaaacaaattgattgtcctgttgcggtgatttatcaagaagtcattgaggaaacactacaatttttcaaatactacgataaccacatcacccaacttcaggaacagatgacaattaagaaaccattttacactaaaacgactaaagagagagtttggggtaaaacaaccgtcattgaaatgaaagaaaatcactctttaaaactgtcaagtagctacgctggcggcaatattttacaatggtttctttttgagacagttaatggtaagacaaaaatcgagtatcaagaagctaatagtttcactgataaaagcaagcaagttaatttctttattgtctcgttattataccgctttgttttcaaatacaaagcagccaaacgtctcaagtacattgccacaaaggttgcttagggggtattcatgtcaattacaaaaataaacaatatttttcacttgtcaaatactgatatgagttacctcatcaaaatcatgccaaatggacaacttgaacaactgtattttggtccaacattagtgctaaaagaagatgacttttcccttttagaacactcagaaggcaaagctgctggcactgttaaatatgccaaaaatagcagttttacattagctgataaacatcaagaatgtgccctttatgggacaacggctttccaagaagcttcacttgaagtgaccgtccatgataccccacactatttagagttaaaataccttgattacgatactcaaaaagaaaagctttcctattctggaccacatgtcagactaaatgatgacgctgaaatattaagccttagactagaagatgctgggttgcaattacaagtcactttagaatatgtcttttttaaaaaaggaaaaaatatcagcaaacgcgtccttattaacaacaatggacaacatgatattgttttaacacgcgcactctcctcaaccttttggctagaagatgccaacgactatcaggcttatcatttttcaggtgcttggatttcagaacgtcaattaaaaaaatgcccacttcaacaaggaagttttaaagtcgaaagtttaactggtacaagtagtcatcaacacaatccctttgtcgctattgccaaaaaagaaacgacttttgacacaggcatgtgttatggagcaaacttggtttattctggtaatttcattcaacaaatcgatgttaatgaatggaatcaagcaagattaatgagtgggatttcaccttatactttttcttggcaactaaaaccaaatgaaaattttgcaacaccgcaaactgttttaagttttagtcaagaaggtctcaatgacttagcacaagaaaacgctgattttatttctgaacatatcatttctccattctgggcaaaacaagagcgaccaattgtgctaaatagctgggagacttacgtttttgatttcgatgaaaacaagcttttaacccttgctaaagaagccacagcattaggtattgaatgttttgtcgttgatgatggctggtttgccaaacgcaacaacgaccgctcatcattaggtgattggtacccaaatcctgaaaaatttccaaatggattacaatcatttgcccaaaaaattcaccaaatggggttacaatttggtctttggtttgaacccgaaatggttaacgaggataccgagctttatcgtaagcatcctgattggattgttgagccaccacaaggacgttattcatacggtcgtggtcaattagtgcttgactttaccaatccagctgttgtcgaaaatatttttgaacaaatgtctctgattattgatgaaacacaactagattatctcaaatgggatatgaaccgaaatttaaccgaagtttattccaattatctcgccaaaaacggcatcagacaaggagaatttttccatcgctatgttcaaggtgtttatcaattatacgaaaaattacttgaacgttacccaaatctcctcattgaaggttgtgcatcagggggcggacgatttgatttaggtattctttattatagccctcaaatctgggttagcgacaataccgatgcgattgccagattggatattcaagaaaatactgctcttgcctacccaatcacttgcctatctaaccatgtctctcaagttccaaatggtcaaattcaacgtattacccctttagagacacgtttcaacgttgctatttttggaattcttggctatgaactggatttattaagtttagacgaacactcaaaaaatattataaaacagcagattgcactgtacaaaaaacttagacatgacatcatgactggacgtttctatcaagttctgaagcgtccaaaccagcgcatttgggcacttcaaagtccacaaatcattttggttgggtacttttcaatcctagctgatattaatcaaagtaccagcaaaacatttacccttccttttgtagattctcaaactacatatgatattgtggataatcaaactgtcagtggcagtctattgaaatatcgtggtatgcctgttccaatcgccctaaacggaactaatcaagaaactgctgctttggttggtgattttcaatcaaaacttctcctcctcagaaaacattgatatcaccaatcatcctctttccataacccaaaaaagatgggaaccacgtcccatcttttgttatgttttaactatttcagcattgtcttattcgacataagcggtgctgacaacgctccaatttgttgcttcgagtgtgccttgttcaagatagccgtctgcattaacacgatataaggctaaacgtgtttttgaatcgctgtttttacggacactagcataaaccaaattgtcatcatatgctttgacatttacaaaataattctctttatcttcatcagataattgattttgcgaagcataaatggcaagaacccaagcttccacttgctcagtcgttaaatttttagtatcaatggcatcagcaacagctgcttggtcggttgatactaatttgagattagtatttaacgaataagtgaatttgctagaggttgttgtccagaattgtggataaatatagccatttttgacataaattcccgaagcaaattttggtgttgtttggtaactaccaccgataccaccaaaaataagtgccccgatggcttcactatcacttccatcagcaggataaaaacgatagacaccttgtgccacttcttcataaccagaaacacgctctgtaacgatataattagactgatttttagtcattgtgccatcttcactgattgtcagaataactccgtcaaaatcagctgttttccaatttccaacaagctccgcagggacaccttgttttatcgttgaagaggtcttggtctcgctcgtgcttgatgaacttgaagaactagatgtacttgttgacgtagccgttgtagatggcgaccattccgccttattattggcggttgtttcgcgattgaaagctgtgacgagatacaaaataatcagagccaagaaaaccaatggactgattaaaagaatcctgattaaacgacgtttcttgttttcttgcaatttttcgatgtaaacattgcgtaacgcttcaagtctctttttatcatcttcgtctgttacttggcttaattccaaatccaattgaaaaatctgatttttgaggtattttgatttcagggcatccttactctcatcgttttttctctttaaattttctttttcaaattccatatgttggtaaatgattaactttctttaacttttcctgtccagtagtcaaagccatctttaagaacataaagattagtgtagcctgcttttttaagtgttctaataacacgtggaagtgctgaacttctactactatcgtataaaagaacaggtttatctttacgaatagcagacattgagagttgaatttgactagctggaagattacgagctcccatgatatgttttgttttgaaagcgccagcctcacgcacatcaatcaattgacttgtgtgaatcatgctttcaaactcagcattatcaataaatttcgctgcacggcggagactaaaataagtccaagccatccaagcaacgatagcaactaaaataactaaaacgataatccagttcatgttgcgccccttaatctacaaattgacttgcaagacttgctgcaccaatgataccagcatcatttccaagttcggcaattttgatttttgttgttttgcgcacttgtgggaaagcgtaactgacaaaatatttttcaacgcgactacgcaagaattcacctgccgctgaaacaccaccaccgataacaactgaatctgggttcaagatgtttgcgatatttgctgttgtttgaccaagatagaaaccaactttttcaacaactgaatcggcaaaatggtcacccgcttcagcagcgacaaagatgtctttacttgtcaccgcatcaccattgtcaatggcagctttgatgcttgaatcaccttcgtattcttcagccaaatgacgagccacacgcacaacacctgttgctgaagcaactgtttctagacaacctttgttaccacaagtacattcaaatccatcaactggttcaacattcatgtgaccaatttctccaccagcaccagcgacaccgtggataaggttaccgtcagcgataacaccgccaccaacaccagttccaagtgttacaaaaacaacatctggattgtttgcgccagcacctgtccaacgttcaccaagtgcagctacgtttgcatcgttatcaatagcaaatggaatgccaagttcacgttcgataactgaaccgacttcttcagtgtgtgcccagttcaagttgaaagcacctgtaactgtttttttagcgcggtcaacagcacctggagaccccataccgatacctacaaaatcatcttttgtcaaaccgtaaagattcaaacggtgtttaattgattcaacaatatcagggacaatgtgtttaccatcttcaaggatattcgtgtcaattgcccatttttcttgcacttctccctcaagtgttaggataccgaatttaatcgttgtcccaccaaggtcaatccctaaaagttttttagtcattattttctttctccatttctaaacggtgctcacgtcgcaaaatcaattcagccgtcaggtaatccgtcttgtcaatcaacccattttcatacaatttttctaattccagtttcatgacttcaatatcataaagacgcttaccgatatagacataaataccaaatcgtttcaacaattgttgcacatcatataatgttttcatatgaagcattttatcaaaaaaagcaagcattttcaataagaatatgcaatcggtttctctggtttttacatacttttaacataaagtaaaagcaggtcatgcgacctgctttgttgtctcaaatctttgttcataattgattatcgcattgaattcctcgtaaatttctatcgctaaatacaacctaagctagggttatcactggatgattacttaaaggttggtcatcatgtgaaatcaagataacgattttatccttcgttaattcttcaatcaaatgcattaatttaggctttaatatctgagcaatattagcaaaaggttcatctagtattatcacatttgcttcacgttttgataaagtaactaatagttgtataacttgttgttctccaccagacaattgatcaactgactgcattaacaaatcatctgctctattaactataagatattgccaaatttcctgacatggtgaagtctccaagaacgaaaaaagctcgtcttttgataggtatgttgtcaacaaatcacagaccaaaatattttgaggaatatcctgttgaaccataactgatagctgatttgaccgcaattgcctcgtattaatatcattaattttattgtggttaagataaatttctccttgatagttattttttaaaacaccaatcaacgtttttatcaaggttgtttttccaacgccatttcttccctttagaatataaagcttccccttgcttaatttctgattgagattattttgataaagtatctccttaccgtcgcgtaaaatattaaaattttcaaaagtaatttgactaatattttctaccatttcagttccttcagtatcatttgatatctctaaaagttcatttaaacgattaactgcaccgcgatattcttgcaaatcaatagcaattccaaagaaattatccaaacatgaaataaaatcaccaaaatattgaatgatagccgtaaataagccaattgataattcttttctgactacagctagaccacccactataaagaaaatagcttgtgaaacaaaggtcacaataatttgtaatgttgaaacaatgtaacggataccaaaattatgtttaatagaatccatcatttcttgaaaactagcagataaatgttggtactctgctttttctgtagatttgattttaatattgagaaaacgttggaaaatactactttgcaaagactgatagcgatttgcgttctcacggattgccaaaaaactggtgtacataaatcgatgagaagcataataaataaccacataaatcaaaattaaaatgctaaaataaaaaaacaccgatggctgcaagactattagaatcgcagatatggctataattgtaataatttttccgaaaagatatggcagttttaaaaagataaaatcaactagcgtatcaatatctgattttattcgtgtattaagatagtttccttcataatcttctaaaaaacgaatatctttttgtaataatatctccaaaaacatgctatacagctgatattttcgatcatctaaaagaacatactcaattcgagaagaatagtatgaagaagctaaacgtaacagaaaaatccctagagctaacaaacataaaatcacataatattgctttacaccacctgaaatcaaagtattaattatctccccttctagcaggggactaatgatagcaatcattgtcgttataaaagtaactactaattgaataatcaaaatagctcgaaacgaaaataacttttcctttaataacttattcatatctcccactcccataccatctgatagatattaaattaggcatcaacctcatggatacctaaccttaatttcaggatttttaatagtaaactcctaaatcatcattcattcttctactataaatactctatatacaaagaatttaattggcactagtttatcactatactttatatatgtaaagtatttattttaattttctgattttttaactttcaacataaactaaaagcaggtcgcatgacctgctttgttgtttctaggtgagtgaaaaaacgtccagtggacgtttttttatctattttgaaaattatttgattcctggtgcttgtccgcgttcggcttggagcatccagattgtcttttcagcgtctgcttgggcagctgtgaaaatatcgttagaaggtgcgtcaccttcttcgtcagtgacatcaagcccaacttggtaaagtgctgacaagtaagtataaacgtcaaccaaacgtgccaaatgttcgtccattgttttgtcaaatgaaccagttgtttcatctaacttagaattttcatcaaattctttcaatgttgaatatggagcaccaccgattgtaatcaaacgttcgctcatttcgtccaatgaagcgttaagaccgtccatcaattcgtccatttttggatgcaaataatagaatcctgctccacgcatgtaccagtgaacttggtgaacaattgaggcagcttttgacaaatcagcaaccgcttggttaagaacagcttttgttttagcatttttagcagttgatttttgtgagatattatgtgttacagatgcgtaaatgttttcagtgattgtttgagtcatagtaaacctcctcgtcaaatgacattttaggatttcttatcctttactttacaatgctattttagaataattctaaataaagagcaaataatatgctcacttttttaattatttttcgaataaactagtatggacattttattattcttttttctaggggcttctattgcttcttttcttagtttaatcgttgatcgatttcccgaaaaatcactcatttttcctgccagtcattgtgattcttgtggaaaacaacttgccgttcgtgatttgattcccattttttctcaactgataaatcattcacgttgtcgtttttgccacaccaaaattcctttctggtatgggctgttagagctttattttggggtcattgtcgtactttactattgcgcacttctctcactcgaccaagtttttatcttgttttttagcacaactcttagtctttatgacttgaaacgtcaagagtttccattgttggtttggctccttccaagtatttttttgctttttgtcacgccgattaatgcgctagctattattcttttggcttttgggataatggcagagctgattgatttgaaaatcggtagcggtgattttttctaccttgccagtttgagtctgcttcttgaccttcaaaccattttatggattatcgagcttggctctctttcaggtattatttactactttttccagacaaataaacggattccctttgtgccatttttatttttaggatatctaattttgtttatttttaaccacacttaattttttaattaaatatgctttattttttgaaattttctgctataataggcattaataagagatttagaaaagaggtagtgccttggaaacttctacacattaccaaaaatcactcagtgaagttaatcaaagtattgctgtcccaaaaaatgcctcattttggcgtacccttagagcctttattggaccaggagctctggttgccgttggttatatggatcctggtaactggattactagcgttgtcggtggagcaacttataaatacctgcttttgtctgttatcctcgtctcatctttgattgcgatgcagttgcaacaaatggctggaaaattaggtatcgtgaccaaattggatttggctcaagcaacagctgcacatttgccaaagaagctccgctacttactttttattgtgattgaattagcattaatggcgacagatttggctgaagtcattggttcgggaatcgctcttcatttactttttggttggtctttgttattctcgattttcatcacgattttagatgtctttattctcttatctttgatgaaattgggattccgtaaaattgaggctatcgtatcgaccttgattgcaacgattttgattattttcctttacttggtcatcttatcaaagccaagtctttcaggaattttgcacggttatctccctaatgcgtcgattttagatttaaaacaaagtggcgttaatagtaaattgacattagctttggggattattggggcgacggttatgccacataatctttatctccattcttctatctcacaaactcgaaaagttaattataagagtcaagattccattaaacaagctgtgcgtttcatgacctgggattccaatattcaactctcgcttgcttttgtggttaattccctattgctcattttaggagcttcactcttttatgggcatgctagtgaaatcaacgcattttcacaaatgtatgacgctcttcaaaattctgaaattgcaggtagtgttgctagtgctgctctatcaactttatttgctatcgctttgcttgctagtgggcaaaattcaaccattacaggcacactaactggacaaattgtcatggaaggctttttgaaactccatttgccacaatgggttatccgtttggtgacacgtttggctgctcttgctcccgttatgattgtggctgtgctctatggtagtcgcgaaagtgtccttgaccaactcattgtttactcacaagtttttctatcggtagctttgccattttcaatctttccattggtttatttcacatcaaaccgcaaacttatgggagaatttgtcaatgccaaatggaataccattctcggctatctcgtcgctattgtattaacactgctcaatttaaaactcatcattgatttgttctaaataaaataaattaaaaacagagactccacatcaaaggaatctctgtttttttgctgaaatgagtttatttttgataatttgagccgtatttgacgaagtcagcaacatcatctgtttttccttcgtgtaagtctctaacaatttttgttccgacaataacaccgtctgatactttgttaaagcgctcaatgtccgctggagttgagacaccaaaacctgttaaaacaggaatgtcagcaatggctttcagattggtcaaatgtttatccaaatcatcacgataattaccagttttaccagtaacaccgttaatagcaacggcatagataaatccttcagcatctttacataacgttttttgacgttcaatacctgttgtcagactaacgagtggcacaagcgcaatatctgtgtcggtaagatatggttttaccatattttcgtgttcgtgtggtaaatcaggaataatcaaccctttaacagacgtatttttcaagtcagcaataaatttctcaatgccgtattgatagacaggattgatgtaagtcatgatgaccaaaggaactgtcgtttgtttttcttgtaatttttgaacaatcgctgttaaattcacaccgttagccaagcttctttgccccgctaattcaatgactggtccatcagcaacggggtctgaccatggaatgcccacttcaatagcagaagctccgctattttccaaaaaagtaatggtgtcaaacaaaccgtctaaagctttttcgtggtctcctgccataatgtatggcacaaaaattcctttaccgcttgctgcaatgttttcaagatgttttgtgagtgtcttagtcatagtctatttcccttctgcttccaaacgttcttttacttgcacaacatccttatcaccacgtccagatagacaaacaatgattgatttatctggtcctaattccttagccactttttgagtcaaagcaatggcatgacttgattcgagggctggaataatcccttccaaacgtgatagaagcataaacgattcaagtgcttcatcatcggtaatagaatcgtatgttgcacgaccaatgtctttgaaatggcaatgttctggaccaacgcctggataatcaagaccagctgagattgagaaagcttccatgatttgtccatgacggtcttgcaaaacattcatcaaagcaccatgcaaaatacctatacgtcctttggcaaatgttgcagcgtgttcttcagtatcaagtccatgtcctgctgcttcagcaccgtaaagagcaactgattcatcttcgacaaatggatagaaaagaccaatcgcatttgaaccaccgccaacacaggctaggacagcatcaggcagttttcctcctgaaatctctgcatattgttcctttgcttcttgaccgataacagattggaagtcacgaaccatttcagggaaaggtgcaggtccgagagctgaccccatgatatagtgtgtatcttcgatattagctacccacgcacgaagggctgcatttacggcatctttcaaaacgcgtgaaccatcagttacagaaaagactttagcgcctagcaattccatacggaaaacatttagtgcttggcgttttacgtcctcttcacccatgtaaatcgtacattccatgtcaaaaagtgcagctgccgttgctgttgcaaccccgtgttgaccagcaccagtttcggcaataattttctttttacccattcgtttagcaagaagaacttgaccgagggcattgttaattttatgagcacctgtgtggttaaggtcttcacgtttgaggtaaattttcgcaccgccgatatgttttgttaaacgctctgcataataaagcggtgtttcacgaccgacataatttttcaaaagcgcatcgagttcttcttgaaagcttggatctgccttagcttcgcggtaagcttcatcaagttcgataaccgcagtcatcagcgtttcgggaacaaattgtccaccaaattttccgtaaaatccattagtatctggttggttatagctcattttttcacactttctataaattttgcaatcttcaataaatctttttcaccatccgtctcaacaccagaagaaacgtcaacagcgtaaggatgaaagaaagttatggcctgctggacattatcgacagttaatccgcctgctaaaaaatatggcttcgtgattttcttatcttttaacaattcccaattaaatgtcttgcccgaaccagccaagggggcgtcaaataataaataatccgcttgactatcaatttcttccagtgctttttggacaggaatggcacgaatacttggaacatcaattttcttaaagagctcttcttcaaaatctccatggatttgtacaaaatcaagaggcactttagtaatcgcttcttgaagttccaccaatgttggacttacaaaaacacccactttctggacagtttctggaataaactgagctaaatagttagcttgttttatgccaacttgccgcttacttttggcaaagacaaaaccgatataatctgctccgcttttgactgcctgttcaacggctgcttgtgttgaaagcccgcaaattttaacctttgtcaatttgcaactccttcactttttcagaaacattatctgctttcatcaatgccgtgccaaccaagatgccattgaaaaatggggcaaccaaggcagcatcgtctttggtgaaaatagctgattctgaaatataaactggcatttctttgaaatgcgctgataattctaagctggtattaatatctgtttcaaaagtcactaaattacggttattaacgccgataattttagcaccaatgcgatgtgcgacttccaattcaggtaaattatgcgtttcgagtaaaacttctagtcctaaccctgtcgcaaaatcataaagctctttcaagcgagcttctggcaaagctgccacaatcaacaaaattactgttgctcctgcattacgactacgaatgatttgtttttcatcaataatgaaatctttggcaagcgttggaatactcacttgactagaaatctgacggaggtaatcaatgtcacctttaaagaagaaagggtctgtcagcaccgaaatcattgccgcaccgctatcttgataagttttagcttgtttgacaatgtcaacatcaaggttaatgtcaccaaggctaggactagcttttttgacttcagcaatcacttgaagtttcttggcattatttttgagatagtcatacagcttgtaagtctcacgaagtggttgtaaggattccgtttctaactcttccacttcttttgctttttgcttcaagatagttgggagaaattctttactcatatttgcacctcttgtaattggtgaagcttagcaagggctgaaccgtctgcaatcaactgacgagcaagggcaacaccctcttctaaactatccacttttccattagcgtaaaagccaagtccagcattcaataccgttgtttcaaggtaagggctaggttcattttgaagaacactcagcaaaatctctgcattttgcttggcatctccaccaacaatatcatcaagttcaacttttggcattccaagatcttgataagtaaactgatgttggctaattttgccattatctaaaagcgtataggtattggtaccatatagcgctgcttcatccatgttatttggaccagtaatgataatggcacgtttacgaccgagtttttgcataacttgcgcagccgtttcttgcaaatctgcacgatacaaacccattaattgagtttcaaggtcaagtggatttgccaaaggtccaacaatattcataatcgttgggattcctagaacctgacgagctggaccaataaaacgcatagcaggaagcatggtttgcgcaaagataaaggcaacgccaacttcgtctagtgctttagaaagcgtctctggtgaggctgtgatattgattcccaattcttcaaggacatcggcagaacctgattttgatgaaaccgaacgatttccaaacttagccatgcggataccacctgctgctagaataaagcaagctgttgttgaaatgttaaaactgtaagattggtcaccacctgtgccacaattacacatggcgtcgtcaaatgtttgcggcaaatcgaccgcatgacttttaagcgcacgtacaattccagtaatttcagaaggtgtttctcccttaaccttaagccccatgagaaaagctgcaatctcgctttctgagacatcattatttaaaatgccatcaaaaagtgcttcaacttgttcttcggataaatcttctctgttagcaatttgattaaaaagttctttcattgtttttcctcactttatttctcaacaaccaatcgcacaaagttttcaatcatttgaagcccgtctggtgagccaatactttctgggtgaaattgaagcccatagattggcaagttcttgtgttgaattgccataatttcttggtcgtccgttgtttttgccacgacctcaaactcttctggcatctccgtcacaacaatcgaatgataacgcatgattggtaattcatttgctagatttgaaaaaacaggtgattctgccaagagctcaatatcgctttgcttgccatgcatgacatttttagccaagccgagctttccaccaaaggtttcagcaatcgcttgatgcccaagacaaattcctaaaataggtttctttccagcaaataaacgaatcatttcttccaattttccagcatcagctggccaaccaggacctggtgataaaacaagcgcatcagctgtttgagcagctgcttccaatgccgcatcatcatttcgcaacacttgaacgtctgaaaaagttcccaaatattgtgctaggttataggtaaaagaatcataattatcaattagtaaaatcattggctatcccctattcgtgtcattgctttagctttattaatcgtttcgtaaaattcattttctgctacgctatcataaacaattcctgctcctgcttgcacgtaagctttttgatttttgagaatcattgtccgaatcgcaatggcaaaatccatgtcaccagttgccgaaagataaccaatcgctcccgcataaacgccacgcttttcttcttccaattcgtaaatgcgtttcatggcacgaattttcggcgcgcctgatacggtaccagctggtaaagtcgttttcaaagcatcaatactttgcacatctagtagcaattgccccttaaccacgctcgtcaaatgcatgacataacggaaatactcaacttccatgtatttcgtcaccttgaccgtaccgttttgagaaattcttccaatatcatttcgtcctaaatccactagcatacggtgctcagctgtttctttgatgtcagcttgcaagtctttagctagcgcagcatcttcagcatcgtttgcccctcttggacgtgtgcctgcaatcggatttgtagtgacttcgccatttttcacagaaaccaaactttctgggcttgcgccaataatctgataatcgccaaaatcatagaaatagagataatttgacggatttgtcacgcgcaaattgcgatagtaatcaagcgggtcaccctcaaatggacttgagaaacgttgactaagcacgcattggaacatatctccctcacgaatcagtttcttagccgtgtcaaccatctgttcaaatttttctttttcaatatggtgcttgaaggttaaagaatgtaattcctgtggagaaaattcatttggcgcttgtgtttgcaaatctttgacgaccttaccaagcgcttgacgtgtcgcatcattgtcacgatgactgtaaatattatcttcaaccacgtaaactttttctgtcttatgatcaaaaatcaaataagactcgtaaacaaagaaatgcatatctggcgttccaatagtatcttcaggaatgtctccgatattttcataaaggctaatcatgtcataaccgacaaaaccaatcgcaccgccaccaaaaggcagatcagtagcttctcctttgaccgttacatgattaagataatcaagtgggtcaccagtaatgacttgaccattttcggttaactcgccattttcatatttgatttcaaaaacgggattataagccacgattgaaaaacgcgcattttctttttctcgtggaattgattcaagaataaccttatgctcaccttgaactcgcatataagcaagaataggtgttaaagtatcagcagttaaaatttttcgcataaaaaactcttttctatttttttgactgactatttacttctgtctctaacgctataaacgctccaatcatcgttcgccagatagcttctgcaacgcgaggagataaatttgctgctcgtgcacgctcgcaacaatttctaatgacttcttcaacacgttcttgtgcatttaccgcttgaaggtcatttttaggttttaagagtcccgcttcttcaactaagcgctgtcgcttagctaaatatgtgattaagtgttcgtctatcttatctatttcttgacgaactgttgctaaatctctcattacctctcctccatttttaaacaaaaaaccccacacagaaaaaacttctgtgtgagggcgtctaaagctagttagcgcggtgccacctcatttaacgaaaaataagtttcgtcatctctatctcctccaacaaggagctgcacgataaggggtgcctacctgaagcgtaccactaattctcaactcatcatcagcgtttgcttcactttgtttttaagaaatcttttcgcagtttgctacctaactcacttatgctaaacaaaaaacctcacacagaaaaaacttctgtgtgaggacgtctaatctattagcgcggtgccacctcattttaacggaaaatcatactccgtcatctctatctcctctagcaaggagctgcacgataaggggtgctcacctgaaaactatttcttatcttcaacaatataccatcagcccaatttcacaaccacctgctacccgttcacagcaaccacgggctccctgtaagcaaatccttgttactttctgattgattaacattatacccaccgtttttctccttgtcaagcattttttgcgaattttctaaaaaatacaacatttttcaccaaaatgtacgtttttagccactaaaaagagctttaatgtgaaaaaaatatctctaaaccactagtcatccgtattttcagactaaaagcttagagatgatgttaaaaagattaaaatgattcaagcgtaacagtcatgactttcttttctggaacgagtaggcgttctaaatgattgatgagcctaatcaaccacgtaaatgctaacaagaaagcactcatttcaaatgctgttaaggacaagtaatggacaacttcaaaagctacctctagcccaaccaacatgccgccaatcacatatgacattaccagaaaatctcgggtcacatttggcaaaagccatttgacactaataatcaaggcaatgataatgaaaaccaagtaaccagcaacacgagtgtgcaaaagatgtgagctagcattatttggaaaatagccaacagcgcccaaatcaagccctagcacggttagcatcacgcgcatcagtcgtagtttccaatttctgccgtatttttcaccgagagcgacaaaaaggtaatcaaccaaggcaactaaaatcagcgccgacaacattaaggtcaaattgaattgccaactgtctttagcttcttttgttcctaaaaaactaagattaaagtgccaccattgcaatgaactattggttgccatggaaataaagacgccgctaatcataataaccgtaaatactgtcgtcaaccaagtcgctctaatctgctctgctatttgcccccaaagcgcacttacagcataaatcgaaactcctaaaatcaaggtagctgttaatttatcaaaagacgctcctgtaaaaatctgctccagcagccagccaaagcctaataaagctaacaacaaaataaccgtaaaggacatgatgatgacgggaagcatccgccagaaaacacgcgccttcagtccacccagaaacagatgacggttgagaatgaaggtaatggtgaaaatcgccattccaagcaccccaccaaagccaatcaaaaaggtgataatcgagtagtcgccaaccaataaaatctggctcctattttgcatagaactaatggcaaaaaagaccacactcagcaaaacagtcgcaataattaatacccaactcgaaagggtacgccgttcaggctcttcttctctttgcagcactaatttatcagcgtataactcggcttccagctcctgcccactagcaagattcaactggtcaataatgtctttgtttaaaacaatatgcaatctttctttgttcatatcatcattataccatctaacatgttttttcaaaacagcttattctcaggggaaaatatatttttagaccgacgaaaattgtctttccacgataatcaattttgattgcataaacaaagaggctacgcacttttgcctcaacctcttctaaaataatctcactttataacgacacttataatggctaaaatccataaatgcaaaggatagaaaacatagaagaaccatttttgataaggtcttgattgccctttttcaccattatagaggtacataaaaggaatcactaaaaatcccatccagtccgaattcacacagaacatctcaaaaccttgttttatggctaaactcaagccaccataaagcgtaaagaaaagaataaagcaataaagaaaataaaccaccgcttgttttgttttttgatgataaaacaaatacgtgataaaaacaaatggaataatggataaaccaccttcactaattaccatgcccacagcagcaagtgctaccgctcccaaatttagcaaaatttttttatttccttttgctttcttagctgtatcaatcagccatatcacactaaatgatatcgctaaggtcagaaagatattgtcagaaataccattttctttcaacaaagccagtgaaataaagtcaccaatctgcatcaaaacagcagctatccacaaccttttgcaatattcttttcgagagtgggtatgaaagaatccctcaaccatcaaccaagcaaataaaggagcaacaaatcaagttaataaatgaataatgcttggcaaaccagcaaaacgaagataaatattatcaaagaccataaaaatggttgcaagagcttttaactgatttcgattcaacttgaatctttccataccgcttctcctattttcattatagcaaaaggaatccttagatataaaccactttcggttgacagtgtgtcaccataaataccgtcgttctttcctataagaaagtatcaactctctagccgtgtcatagctcatcttaccatccaaagctaactgcctaatcaactgaatataattatcatcttcaaccataccatcacctgatactttttgaatcaatttatctagccttaatcgaacagtcggataagaaatatcatagtagctcgccatttcctttaacgaacctgagcttataataaattgcctaatgaaatcaaggtctttctcggtcagcaccgctaaccacggtggcaattgattattatttgtcataccctcaccttccctagtaaccgtataccttaacgatattaaaattattatttaaatatcgtttcataagaaatagcataaaaaatcatcaaatagtttaacaatgtatactttttgataactcacaaaaaattatttatcattttttctaaaaaatccccaaatgactaaggtacatataataattccaagaatagcaggcttaataattaataaaccactactgccaccaaaaataacactatgtataacttttaatattgcactaatgatgataacaactagcaaccatttccacgttgtataaattaagaaaatcaagaaaggtataacagcagttaccacaaaaattttatccaaattccaccctgctgttaaatagtttcgttcaaaatttaaaaattctataacactatcatctatctcatcaggtcttgcaaaccaaaacatacttgtaaacagataaaaattgaaccaaagataactgtataagattttcttagtgcacctatcataatagggataataaacagcggtctaatataccaactcaaaatattctgatgacgtgtaaaggaccattcaaaaaaattatcattggtaaaaaataaaaatatagtgatacaagttgctaaaacaaacgaagtagcaaatatcttatcatacttcctgaacacagatatttccccatcacttctaaattagtaaagtcacttgtattaccaaatacgagaggacgtatgaaaagctaacataccactagcaattctactattaaaggaaaagaataattaaactgattaataatgcaaagtattctgctagcaagctaaaacataaacagcatttatgagtttgttagtctttcatatcgtttcccatcccccataattttattttatcacagaaaattatgaaatataatcattataaattcacactatgtaaaccttttttattgattataaaaagaaaaaatctttagtaaagatttaaaactgaaaagaaagtctttcttgatattttccttagcttccttgcttttcaatttctaggttcagacctcaaagcatctactggatgctttaagtcatcgtaagtctaataatacagtggtctgttagaagaatcaaaggagttcttaaagcttccgagatgtaggagatacttcgtttttcttatccgcaaccttaaacaatttccaaaattgtttaagcagcgcaaagtatcatttggttaaagtccaaaccactgtatcttgtaaattataactacataaacaaagaaactgagaattttatctcagcctctaggtgttaaaatgttaaaagtgtatattatttgagttaaaaagtttcctaagcctttttaactttgtgataaaccaatccagcaaggagcgcaataacaagcactaagccaagaattgtcaatcccaagccactacggcttcctgttgatgggagaagagctgcaatgatgtttttatcttgctctttatcagattttttatttgactgacttggtgttgttggctcatctgatgatggtgtttctggtgtcgttggcgtatgcgtatttgtgatggtcacattaccattttcaacctcaccaactgttgcggtataaccatcaacagctgaaacttcttcaacagtataagtaatagttttcttattggctttttccgcaaggcctgtccatgtataagtccaattgtcagctactgtcaaggtaatgacatcacctgatttttcaccgtttgcgtacaattgtacttggatagcgtctggacggataccatcttggtcattgttatcatcccaaacttttgtgactgtaatgcttgtttcacccggggtgtaactgttagtgatattgtaaccatcataagttgttgtgtaatcagctacagtatcttctgtcaccgtataagtgatttcgttaccattgtcatatttaggtaagtctgtaaatgaataactccaattatcatccgctgtcactgtcttagtatcaacaactgtaccattagctagtaggttcacagtaatggaatctggacgtttaccatcttggtcatcattatcagcccacgttttcgtgcctgaaacttcggtagtttctggggtgtgcgtattggtaatagttgtaccgtctacagatgatgtatagccatctggtgttgttgcttcatcaaccgtataaacaatctcattaccattgtcatacttaggtaaatccgtaaaggcatagttccaatcattatcggctgttaccgtttgactagccactacttcaccatttgccaaaaggttaacaataatcgaatctggacgaagtccatcttggtcattgttgtcatcccagaccttagttcctgacacttctgttgtttctggggtgtgcgtattggtaatagttgtgccgtctacagatgacgtataaccttctggaatattgacttcttcaacggtataagtaactttttcaccattactgtattctgctaaatcggtaaaggtataagtccaatcaccatcagcatttggtgtcacatccactgtatcaaccacttcgccattagccaaaaggttaatggttactgaagtcggacgaagaccatcttggtcatcattgtcattccagactttatcaactttaagagatgttgtgcttggattatgcacatttgtaatcgtaacatttccgttttcaaccacacctgtagttgttgcataaccatctacagctgacacttcttcaacagtataagtaatgtcttgtttgtttgctttttccgcaagacctgtccatgtataggtccaattgtcagctgctgtcaaggtaatcgcgtcacctgatttttcaccgtctgcgtacaattgcacttggatagcgtctggacggataccatcttggtcattattatcatcccaagcttttgtgactgtaatgcttgtttcacccggggtgtaactgttagtgatattgtaaccatcataagttgttgtgtaatcagctacagcatcttctgtcaccgtataagtgatttcattaccgttagcatatttaggtaaatcggtaaatacatagctccaattactgtcggctgtcactgtcttagtatcaacaactgtaccattagctaaaaggttaacggtaatcgaatctggacgtttaccatcttggtcatcattgtcatcccatgttttagttcctgacacttctgttgtttctggggtatgggtattcgtaatattatagccatctacaactgttgtgtaaccatctaccgtttcctctgaaactgtgtaagcaatttcattaccatcagcatcgtactgatctaaatcagagaaagtatatgtccaattgtcatccgctgttactgtcttagtgtcaacgactgtgccattggctagtaggttaatggtaatggaatctggacgtttaccatcttggtcattgttgtcatcccatgttttagttcccgtcacctcaacagttgcttttttatcggttactgtgaccgttgaattatcagcttctgctgtaactgggtctgcaatagcataacctgtcggtgctttggtttctgtgataatataattatcttttaacaatccactgattgttgcagtaccatctgaaccagtcgtaatagtcccaacaacttgtccagttgattcacgtgttactgtaaactcagctccagcaagcgcttcaccagcttcattcactttttgaacggttaaactatagttataaccgctcgctgtgccagaagccccttgatacgtaaaagtattatcagcattatttagtgcagtattttcagaataataagtcgccgaattactaagttgctcaccgttaataagagtatagttagctttaactctatatctaatcatataccctttagaaattgttccaagattaattgaaaaagaggtattatcagcagaaagctcaatattataattgctagtaacattcgttgaaccacctagcgcccaataattttgagcatttttataccaagtcccttcaaatatttcaaaacttccatctacatattccaatccagcagaattaatcgtatcagaaataacgacattagatacagtagctgcagatgtattgacattaatcaagtacatgacttcgtcatcactataactgactccatatttccaaaagtcaatatcatcgctatcaccggtactaacagtataattaataccaccactactaatcgtaatagtcgttgttccatttatcgttactgttgctggtactgttgtcgcctctgttacaactgttctatccacaacaacattcattgagagatgtcctgtaacatcatcatgcgtatcaacataatccgtataagttaatgtcaatgttttagttgtggtatcaatgaccgcagttgctaccactgttgtaccatctgaagcataaacgttaaatgtttgattgcgttgaaaatttaattcatctggtaatgaaataaccgttgtatctccagattttgctgaatttggcactgcaaagtcaaacgaaaattccgtagaagttcctccattaatggcattcgtagatagcgaagtattactaacagtaatatctacggtatcagcaaatgctactctagcagagaaaatactactacaaagtaatagtagggcaatgagtatcttccttagcttagccatttgtctcctccttaaaataaccttaaaatatatacaaaataattttaatatacaaattaaaaaatgaaaagaattataaatttacactgtgtaaatttatttttttatctttattttaatttgattatctttaaattctaagttataatttatgcaaacgttttattcatcatttaaaggagtttctatgacaaagtgcacccgtgaaagaattatcaatgctttctttgagttggctataaacaatcccgaaaaaactacttttaccatgtcagaaattgctcgccaagctggcctgacgcgtcaagctatatatcggaaacattttcgaagtcttcaagagattatcgattacgtacatactctgattgataagcagattcatcaagtttatagtgattatgatatgacgacagacggcaacccatttaactacgtggctgataatgtccttcctgtcatttacgagggaagaacgtggattacttgtctatacacttctgcgattgactcttcttttgagcaatttattgtctctacttataccaaatggggcatggaaaatgtccacccacaaagtgagaaattccacttaccagatgatgttttaacccaattaatcgtcgaacagactatggtcattatcaaaaattggattatccaagaaaatcccaccccacctgatgaatttaaagacgattttctaagactcatcaatgctccactttctacctatctgaatgttgacgacaataaaacttcaaatcagaaagaggttaatcatgcaaattagagcttttaaatcagaagatgctcgtcaaattttagctttatcttcacattttaacgagatagactttttagcctatcgagaccgtgatgttatgacgcaaaaacaattagaactcacccaaaaatcgatagcaagcaacgcttctaatatttttgtcgcggaatcaaacgggcatttttaggctacttagaattgagtagcgaaaaaaattatttcactcaaaaaaagttcattgaagctatcgctgtgctttcaaccgcaaaaaaggcagggagttgggcaactattgatgacaaaaagaagcttggtgtagagaacagcattgcacagaacttgttttagacgtttttagcgctaatcaaaaagccatttccttttatgaaaggttaggctttaacaaagaaattaccaaaatggtaaagtctgtcactccaaaatcataacactttttaagcataagaaaatcctttggcagcatttttcaaaggatttttatttaatgtattaaacgaatggtaagagcaaaaataggattgcccctggaatattattgagaatgtgcaccaacatcgaatctttgatattgccacgacgacgataagcaaggtaaaaagcacttcccatgccaaagtaaaggatgaattcgagaatagtcgttgcatgtggtagcgcaaaaatggctgttgtgacgacacctgttacccaagttaattttccgttaaacagaaggtaggttggaaaagcacgataagccatttcctcgataatgggaccaaaaataccaattaacaaacaatataacacagtgtagaaaaagaaaccaccactaaagtaagtggccacactcattaaagcttcatcatttgctgtcgaagacgctcctgttaaggcagtgataatcaccgttcctccagcggcaataatacgtgcggccaaccagtaaagcacaacaaagccgaaatctttaagcttaattggctgtttaaataagttttccttatcatgtgcagacaactttttccaaaggaaaaaaataaccgctaggataaagatcacataagcaattcctaacaaccatttaatcggagttgacaagtcattttgaacccacaacaacactatcggaatagagttgcaggtaagagacaaacaaataatccctaaaactttgagaacattgagaaaaattttcataagcacccactttctgtataagcagaaaaacaccgtaaaccgtaaatttaacttttcgtattatttcattaatacaacaactatatcatattgcttccaaacggtcaaccaaaacataggaatagcttgaggttatggggagggagtgtgttttttcaaatattttttaccgtaccattcttcaacggatttaccttcatatttacggtatagttcgggatatttaagtttgtagtaggctggaagaaagtgagacagctctacgaatataaataatgctaaaaatgcaagattaccgactggccagactaaagaaaatagaaaatactctaatctttcggcaatatttactgagaataacttcgttattatatttataataacacctatacctaatattcccataccataaatagatatttttttttacaattctttccatagcagaaatcggattatcttcaccatataatatacgcttaagtcgtcttaactgtgtatttaccattacataccctgccataataactaatataaagagaaataaaactccccagaccgtaaaagtaggagtatatactgaaagaaagaataaattcatttctataaacagccaaatcatattggcaaaggtacgaaaattataacgatagcgtacattctgcctaatgaattttcctaaagctcatcaatctcttctggatgttgtttggcataaagcgccgcataaaaagcgtctactaccaaagctgaaatcgtcaaggtaaataaaattcctgagaataatccaaaaacattttctatataacctgttaaaagtggtgggacaaaaacaaccaaaccgaagataagcaaaaaattacttgaaaataacttattatcctcactattaaatttcgattctttttctcggtatgcaccatttgtacgacgatctcgtctgtaaaaatagggatagacaaagaagaccataataacaaaaagagcaatcataggaatgacataaaataacgttagcgaagaatcgtataaggtactggcaccaaaagcctctttagagggaataaacatcattaaagttaaaaaatttaaccaaattaccatggtaacaaaatttaacattagcaaaaaataggttaagaccttatatcttataataataaaattaaaaaatgaatacaaaatactaaataagttgataagtgtacagattaaaaaaattcccttcaataatcccaaattatccctataacccgctataaaatataacaataagtcaaatatcaaatttaaccacgggacaatttttatataccctagttccacaccattcgtgattaaaggtccatgataacgttctaaaatatcctcttcttgatttttttttgatttaatatccatttttatctcctaaagctcatcaatctcttctggatgttgtttagcataaagcgccgcataaaaagcgtctactaccaaagctggaatgacaagtgaaaatagtattccgataacaagcccgaatacattctccaagtaacctgttaaaagtggtggaacaaaaacaactaaaccgaagataagcaaaaaattacttgagaataacttattatcctcactattaaatttcgattctttttctcggtatgcaccatttgtacgacgatctcgtctgtagaagtaagggtagacaaagaaagtcatgatgagaaatagtaagaacataggaataacataaaacagagttaacggagaatcataaaaagtattagcatccatagaatcatctatattagatacaaacatcattaagccgataaaattcaaccaaattatcatagtaagaaaatttaaggttaataaaaggtacgttaagactttatattttacaatagtataattgaagaatgagtacaaaatactaaaaaggttgataagtatacagagcaaaaaggttcctttcaatattcctaaattatcattatatcctgctgcaaaataccagaaaatatcagctactaaattcaaccatggaactattttaatataccccagttccacaccatttgtaattaatggaccgtgataacgctccaaagtaacttcttcctgttgttttttaactctactcaaaacgaacaccgattctaatgtctgtataaacagttccgttaatctttgaagacatgaaaaagattggcgaagcttcttggcacttatcttctaataacattgcttgcagcctatccaaagccttatcaaaatcttcaggttttgtactcgaaatgcgaacaccatacatggttggaattgaaaaatagctattaaattctgctaattcaacctcttctcctaaatagtcttcattcacaggcagataaaccgtgatatctaacacaccatcatgtccttctacttgtggtgttgaataaaataggtcagtctttggtgtgtaaccagcagtcatgatactatctaaagcatctttaaaagcaatacctatcttatctacctcaacggtataattaatactccaaacgttagataacgttatcgtttgattacgtccttctaaaaactctgtcatctcacttctcctctggaataataatatctgcaaataattgtccataaacaggcgtaatgatgagatagagtttatcaggaataactaatccttcttctctcatataatctttcatactatttaaatgttcatcaagcccttcctcaaaaggtacacgcttacgaacacctttaatttctaagctcggtacataagtaaaatcttccgttgaagtaacctctgtattaattggaatataaacaccatacgtttgtttttcttcttgaaattgtgaaggggtaatttcaaagaatgtcggtccgtccttataaattccaaattcaaatggcagatattctgtatattcaaataaagcaggcaattgttctacctcaatacgaaccgtcttttttatcaaatgtgtctgtttaataatagttttttcaatcattttaactcccctttttatttaaatctctctttatcaaaatgtttttcctgtaacatatcacctaatgcatctactgcttgattttgaacctttgaagcgactgctaagtcagccttgtgtcggagtgggtagagaataataaaccatccagaaattatcgaaaaagaaaatactgaatttaatccccagactaaataaagaaggtaataatctgaaataaattcagccattagaattgctggtatccccataatcaaaagaggggtacacattaaataggctaaccttcttcttgttttttctgaacaaatttctccgttattttttacaatgctgtatgctaaaataaattcccacattataggatataagataattgaagtttcttgaaaaataataaagttcaaattaccatcaccccaagcagctgatgatgaaattggtgaggtaaatagataataagcaaacatcagaccagttgaaatcccaacaagaaattgattatcatgaaaaaaatcccaaatagttaaaaagaaggatgtcacccaaataataatacccaaataaaaaatcattttatttaataccattggaagttcagagtcattcatagtggcataaaacataaaaaatacaataggatataaaataaataatcctgatagatttcctaaacgagatattccttgtttaacagttgctttttttcgtttttgctgtaattttaaacgctcaattagtcccatcactcttccgtaaattcatctttatcaaattgcttttcttgtaacgtatcactcaaagcatctactgcttggctttgagcagttggagaagattctgaaacaataacctcatcattcttatgttgaagaggataaaatgccatgtaccataccatatctatgaacaaggaaaaaaataactccgttccccaacttaaataaatgaaataataatccgaaattaaaattgacattattaatccaataaccattaataaaagcgctggtaacaggtaaaagttactaattgtctttctaaatctaaccgaacgaaaattaccatttctgtcagaaagtacataagttgcaattacatatgaaataattggatataaaataagtgagatttcttctaaaataataaaatttaactcaccaccaccaaaagctgttattgaaataataggaattgaaaaaaaaccataagtatacattaaacacgttgaaagtccgacaagcacttgattattgtgaagaaaatcccaaatagtcaaaagtagagaagtcccccaaataataatacctaagtaaaaaattattctacttaataccatcgggagttcagaatcactcatagtaccataaaataataggaatataagtggatagaaaataaataatcctgataaatttcccaaacgagatattccttgtttaattccttctcttctacgcttttcttgcaattttaaacgttcaattaaccccatgttgccttcaatcttccgtaaattcatctttatcaaattgcttttcctgtaacatatcacccattgtatccactgcttggctttgagcagttggagaagattccgaattaatagattcatcatccttatggcggagtgggtagaggatataagaccatataagaattaaagaattcgacattgacatttcaaatcctaaaaacgcaaacctcataaaattccctaaaaaaatattaagtggtatgcataaaactcctaaatacataggtaagtatattaaattcatatactttactttttgacgatcatctatataatttcctttattatctaaaataaataaagctaaaataatataagataccaatggccagatgaaaattaaaatttcttggattactataaatctcaaagttccatcctctaaagcagttgtgataaaaggtaaggctaaaaagccgtatacttccataaaaaatactgctaaactcgagtaaaactgattttttaacttatgtgaaatgactactagcagaatagaaagtaaccaaattatacccccagaccattttcctaatattactaaaaaattaggaactaccgagttgttaactgttattaaaaatccgaaatataccaatggatataaaattaataagcctaaatatacaccaaagtaaggaactccaccagaaatattttctccttgatattttaacaatatttttagacgcctaattaaatttaagtccatgatttccaacctttcattccttttacaaaatcaccacaacctttaataaaagagttaactttagattttacattattagttagattagtactcttatcaatcttatcaatcctattacttacaaatatagcagctcctactgctacaattcctgttactagtacaggagctgctgtaaggccaagaactcctgtcgcaaaggcccctacagcagccgctcctgctgtagctgctgctgtacttgcgacacctttaacagttgctttagctgcgtccacggcaaatcctgtcgctacactagctgaaacttccgcaccttgtaatccttgcttcttagcttgggttttatttttactaacattgtcaaaagtctcagctacaccatcaattacattaaggactgccacacctttagtaaattttgagcctgtttttagagctgttacaacatttgattctttaaatgctgtttttactcccttagtgatttgaccagtttttttagtagccttagccacattttttagtgttttgacataaaatgcttcttctgcttcagaaatcaaattagattttgtgcctttcagaacacctttagcaatttcttttgccttacttgtcccttttagaccatttttttcaattgtttttaatgactttctgatttcttttgaatagtccgtttcacctagcgttttcatcagcttttcaaaactcttagtcactgttttattaccatgatattgaacaatactatgtgactttttctttttaagagttttgcttgttccaaaaataaagtctagagcatgatcaacggttttctcagattttttgatgattgtatttcccatccaatcttttgaaaaacgatgttctgcataagctgatgttgcccattttttagcttttttgtaatattttcttccaaccaaataaggtgttgtaacgctagcaacagtcacttccagtcttgtctgctccatcatatacccactatacttggaatcatacaaattcttagcaagagcattattctgttactaaaattatccaaagtaaacctttaaataaaaagggcacaagtgtgccacttaattaatacgcatacccaactaaaataataactttttctgccccatcatctggtaaaacatgataaaacggagtgttcaattctcggtcattttgttccaatgtccacaataatctcgcatatgcttctttagttaattcctcataattacggtcaattgctgttaaaataatattatcaatttcaaaataagatgaaaatctcattccttcaatctcaatataatcctcttcaacaggcaagaaaaattcaatatccatattaccatcttctggaacgttgtttaagctataaacaagtggtcctgatggatgtgcgccagccgtttctaccgcagttaaaaaagtatccaattcttcttttaattctgtgatatgaaaagtctttcgtttcctaaggacgttttgtgcttgaaaagcatcttgaacagtaactccctcagctacagtatattccattagtctacctccaaatcactgtatacatcaaccatcaactcatcatctgaagaaagtgataaaacatgataaaccgctaaacgttcatgttcatcttctgaatatttggaaactaaataagtataataatcagccaactcttctgcactaatctgcgcaaagtctttgctgtcaatcaatagattttctttaaataatagttgaggttctttacctgttggattaatcgcattgccaaatgttgtaaatatttcaatatcactcttgctacttgataaagggtagaatttaaaataaactggtccgtctgaataaatcacatccagcatatctccgataaattcttgacaagacgtatagacttctgcacacatttcttctaaaataaattcttcaggtaaacttgcttcaaagccaacgatttggacaagacttaatttttttgatttaatatccattttttctctcctaaagctcatcaatctcttctggatgttgtttagcataaagcgctgcataaaaagaatctactaccaaagctggaatcgtcaaggtaaataaaattcctgagaataatccaaaaacattttctatataacctgttaaaagtggtggaacaaaaacaactaaaccgaagataagcaaaaaattacttgagaataacttattatcctcactattaaatttcgattctttttctcggtatgcaccatttgtacgacgatctcgtctgtaaaaataaggatacacaataaatatcattactaaaaaaaggataaaaaggaaaataataaatactcttgaggtaattgagtatacccttaaatatacatcccctccgcctataaacatcattattccgataaaatctagccaaaccaataatataaagaaattcaatgatagtaaaagataagtaaaaatgttatatttttcaataacagaattaaaaaaagaaaagaaaatactgaaggcgctaataagtacacatccaccaaaaaaacactgaatgactcctataatatcattataatatgcagcaaaataccaaaaaatgctagctaataaattcatccatggaactattttaatataccctaattccacaccgtccgtgattagtggaccgtgatatcgttctaaaataatttcttgttgtttacttgatattttttttgatttactcataacccaaacttacctgccaatcctttcaagccatctttagcgcaatcgtttatagattttttacctttcccaaaaaatcctttatttaatgcccaagagactgctatacctgccgcagcacctaccacagttcccaatggtccacctactaaagttcctactgctgctcctgcagctgctgcacttgagcttgatacaacatcgactgtagtgtctactgcaaaatttctgactttttcttttgtagatgatcttctatcgtcaataaagtcagttttgatgttagaaccaatcgtcattaccgtccctgcaaagcctaaaacttttcctgctttagagaaattagaagcctctttaaattcattaagcgggttaattgttgatttaaaattatcttttaaaccagatttaaaagcttctttccctgaagttccgacacctttccagtctattcctacttttccatttgccttaagttttcgaccattataaagtgttgtctttttaaatgaaaaatcctcgccaacagtctttttatattctttagtacctttggaataaaggtgaactgtttttgttttacctttgcttggctttttatacaagaaacgttcgccaactttcacacgaccttttgaatcgaccgtgagttcacgaccaccaataaatttcttctgcttcaaagctttatcagttgcatccaaaatttttacaacttttttccccttacctatcgatttcttagtcgaagtaatcaatatgccagcttttacttctaaaccacttgtttccaacatatacccactatacttggaatcatacaaattcttagcaagagcatttttaagttggtctcttctagccttgccgttaacaactgacttgacctctttgacttcagctttaaaggtgctatctttgtaaaactctttggctttcttacttgtatatgagctacttcctaaatctgacaagctactgagttgcgtattctgctcctctagaatatcccctgcttcacttgtaaagactgtgctattgaaaatccccatatccttaatcgtattggtcaagactttcttagcactcttaaactctgaaatcgcatcagcagttgtcactttggttaatgaaatgttaatgcattatacagaaaaagcgcaaaagcgccttaaaatcaattagtcaatttgctttcgtggaatttccaaattttcttcccactcatgataaacttttaaaaatctatcttcttcatcatcatgatatccctcaaaaacaacttcatcaatattttcatgttggaaaaataacgttgaatttgtttgcaatcctgcggggtagagaactcccatatagtccgcaaagacctgctccttggtatcaggatcttcaaaaatagccccacgaccaacaataactaacttttgtgttccctcttcaagataaacaatacttcctagtggtaataattcttttgatttattcattttctgttaactccttgtgttttttcaaatattttttaccgtaccattcttcaacggatttaccttcatatttacggtatagttcgggatatttaagtttgtagtaggcatgtagaaaatagggagttcctataaatatgactactgcaggcattataatgttcattattatcactgcaagtaatattccaatctcctctaaagagtttgaaggctctcctaaaaacatagaaaccaactgcttaacaataacagctactcccaatattcccatgccatacatggaaatcaattttgctatcttatcaatttttctcggttcattaaactcattatacattattttccgaattcctcttaattctaccgctaccatcaagtatattaaaattatccaaatcatcataatggctaaaacaataaaaaatggtagattagaaagtagaagtcctatgattaacaaatctatttcaatatataaaataatcatgtaggtaaaattatggaattgataacggtaaggtaagacaaacgcctgattaaaatattttcctacaattacgagtaataaccatagacataataaaattaaatatacctgccatgttaaaaagttgtaattagaaggttgaaaatccaacccatttgattgataatttgttagttcagtagaagcaagcgatagtagataattaaaacaaactggaaaaagcaaagttaatataacagcttgtattttaaaaccaaatgttggtgtaccattaataactttttttgctattttatcatgttgctcttgttgcaattttctaaaaccatcattttctaaattgatactttcttcaaaacttgcattgaatattgattttttattcattatttatcacccaaaacctagcgcctttccaatacctccaaatgtagttgaaatagcttcacctactgatttaacagcttttcctactacttctttagatttatcatagaatttcattgtaagatcttcagcagtatccaatactcccgttttatcaagaatgtatatccctaatccaacacctgctcctattactgctccagggaatcccccacctacggctgctccaatggttgcgccttctaacggtcctacacttttaactgctgaaaacgttccagcaataacacctttaccaacatctccagtttttgcgaattctttaactccaccagaaacacctgaaatagccacatctgcaaatgttaccactgttgcagccttgccagcaaattttaaaccttttcctaaaaaattaagagttccgctcacctcaccaccagctgttgctgtttctgagattgctttataaaatttcgtagattttaaaccttctttcacaaaactttttatcggatcagctacttttttagcaccatcaaatactttagaggtaccagcaatcaaagttcctaatttagtatttttgattgcattcccaaattcttcgtacttcatcagtcctttgagaacgtaagtagccgctttttctcctttttctccagattgcgctaatccccatataatttctttaaaaccttctgattgttttaaagacttgataagtttacttggtaaaaatttaaaagcttcacttaaatattttgctgtgtcattatccataactttttgaaattctttataatagtcgcttcccttttcccttagtgttaacatgattggcgttggcaggcttgtttccatcatatacccactatacttggaatcatacaaattcttagcaagagcatttttaagttggtctcttctagccttgccgttaacaactgacttgacctctttgacttcagctttaaaggtgctatctttgtaaaaatctttggctttcttacctgtatatgagctacttcctaaatctgacaagctactgagttgcgtattctgctcctctagaatatcccctgcttcacttgtaaagactgtgctattgaaaatccccatatccttaatcgtattggtcaagactttcttagcactcttaaactctgaaatcgcatcagcagttgtcactttggttaatgaaacaatgtcagcaacctcgtcaattgctttattaatctcatcagagcaagtctttaattgttctaagggggaatcaaatttgtccaccatttgttgtaagacatccgtgtcaataatggcactatcgctcgtttcactaacggtttctttaaaggtactaatcagattatcatacccttgtgagataaccgctaagctattcacgtagttggtcaacaaaggtacttgatagttggtgattttgttatcaatagcctccttaacattcccttgaagtgcgtctgaatcagctgtgctttttagcttgcgactagcactttccaactgacttttagcgctactaatggaactggcaagactctccttttgcgacaagacctcgctcatcttaatcttcataaatctctccctttggatacatcactgaaaaaatcttatcataatagtaagcacgacgtaactcttcatcacaataatgtttatcacgcacatctgtataaccttcagaaatgacacgtttgataaaaagatgactaagcaataatgggtgtgcctcaaaatcaaacccataaggccaaatataaccaacatagtcgacataggatgtttgattatttatcaagacacgacgtcccgaaataacaacattaaaatccatgttttctctagcaaatgctgctaccaaatcatctggtaaaagctctttatcaagctctacaatgctacctactggataaatttttccaaacaataaatctacataagacaagtaactttgaaaaataggtaactccaaaatcaactgcttatctgattggtaaattgtcacctgccccaatgtataatcaaatataaaatcataaggagctccaatgacaggatgataatgatactctttttcctcatccaaataagccaaatgacaagctttaaaaatatctggatgtccagaaaataccaatgctagattttctaagaaaactatatcctcatcagttatcggtaaattttctaaagcctttctaagtaaagttagccattcattttgcattatttgcctcctttactacgtgtgttcttagcttcatttgaatcatcatcagatttatttttaccagctttatacattttctccgcgtcggtttttgtataagtttttagcttcttaatagatttattaaacttatcaatgatactactgaattctgtaaatggttttaaagttgtttcggtaaacgttagtgatttgattttactaatattacttgtcgatgatgatacaccatcagtcaaacttttccattcctctaaatctactcctgtctttgccataaaatctccctttacatactacctgctgccatacgatcatacattaaagcttgttggtcccaactattaatttgtgacgttaaacttgtaattttactttctagttcagcgattttattattaatagttgttacattctgattttcagttgttttgtaggttgataatttttgaagtgctgatgacatttttccttgatattttgtttgacgagcaccactaaattctcccgtattgacattatttaaatttgacaatgttgatttttgactagatacttgacttagtttactagtaatttttgattttgctgtctctaatttttcctttttatctatagcagcttggcgatttgagcgtaaagctttactatgattacgacaagttctagcacaacctcggtaatattttacttccttacttcccacagcattctcccatattaaagttattaaaatacaagacaagccagataccaaagtatctggtcttatcaattccgactgtcaccaatcaactgtttttactcttgcttgatttcgttaagaaataagtaacaataattgaaaggacacttgaaatagctgctgtcacaataatccaaatagtattatctttatcagatgttactccactagttgttttctttgtgatgttaacaggatttgacaagaagttcataacagcctcattatctgtaccaccactacgtgcattttttaatactttagcaaaattattggcatacgttgtactttcttcaatattttctgcttgggcactaatgagtttgttagtatttgtcatggtatcgtcaacatttgtttgaatggtaccgacttgtgaaacaagctgttcaaaatcatctgtcattgtaccaattgcttcataattacttgttgttgattgagcactatcagccgttgatttgacaagttctgaaataccatcataaagagcatctccactagcagtatctgtataaagcgttgaactatctgaatttccactaccataagaacccacgttaagctctttagcttgattttgtgaccattttgcatactcattattcagactttgtgaggttgttttataccaattaacaagactttgcaattctgttgaaaaatagtctgttggcatatagccttctggtaaagttggcaaactatcaatggtagattgcaattcaataatttcattagtcaactctgtgtataaagtaactccactttctttgaaatttgtcacatcaagaccatcgatattatcaaatgttaagttaccatacatattagccacggaattagcagatggattagtaatatcaatttgacttaaatcagtttgaccaggttctccataaagtgtttgaatcatcgcagaggcagtatcaatcttgcttaattgagcaaaaattgtttttaaatcatccttaacaagactaacatcatcagctgtatctgtcacgtaaattgtataagtcattggaatacgattatctccaatatttaaatcaaaggtaatcgtatgagttcctacagataaagaatcaaaagtataagaaatttttaatgattgcgcttttgaaattgtcttgcttactgaattatcatctgcaaaaacaactgttcctcctgaaacattagaaattgtaacagttgttggatcttccttggtttctgtattttctgtagttgttggtgttgtttcttgctcattcccttctgatgaatttgaagaagtatcatctgtatttgattcatcttctgaagttgatgaagtagtcgttgttattatctgtgttgaagttggagcaacatctacagaaataacattgctctgttcaggcttcgcatcttcagctgttaagaatgagtatgtagcaccagaagcagttgtcacgcctttagcagatttatatttgcctaacaaggccaattttgattgataatcacttacctcatcagacgtcattgctcccatttcttctaattttgaaaatagagttgcataatcagaagcagctacatctacacttcccataaggctagcaatttctgtctcatattcagaaggaagtgttccaccaagtgattcttgaatttgattagctaaggcagacttaacactatcgtctgttacttgattaagcagatctgttttaattgctaatttacgttcttcttgattagttgttgcaaagtaactatttatatcaagcgctaaatcagaattaaaatattgattagaaactttagaacgagttgcttttacctcttctaataaatcagataactcagttctcgcattttcaacttttgaacggtaattttcaacttcttcgttataagctgtaatttggttttcaaataacttataaacagtaccattgcttgttgattctgttgtaatatctgatgtagaagtgtaaaaactgcttaagctgctaagaatgttactatttaaagcatcgtaaagttctgtatctgtttgatattggtctgaaattgctgtattcgcagttgctacgtttgttttagcaatatcttgttgcaagtctacaaaacttttaacttcaggtagttcgctatttaaaccactactagttgaatttaagagttcagaaatgctactaacatagttgctttgagtatcctcaaagcttttattgctcgtctgtaatgcattagcagcactcgttaaaccacttaaactttgacttgccgaatttgatggcgaataaatgtaacttgataagctagtatagctagcttcttgatcgctaacaatatttgatacattacgcttagcgtcatccaaattaccaatgacacttgaaaagtacattttaatgacacgttgattaattaaattcaagtatgttccaacttggctttcaacattcttttctttaacagtatcagttgacgtttttactttgtagctcacttcagcttgggaaggattaaaactttctaattgcagaattttttctgagaaatcttttgaaatataaataactacatccgcactaccgtcactatatttactttcagctaaacttcgtgacattgtaatccagttgtcacttgtattatcagcattggttaacaagttagtgaattcttgtccaaaattatagtttacatcatttaagctaccaccggcatcttcattaactaaagcaacagtcaaatgctctgttttcttagctttatctgtcacagagacttccttatcctgcgtataaacaaatactcctgaaataatagctagtagtgaaataaagacactaattgctaccacaataactcttggttttatcttaaattttttcatttccccttattcctttgctattttaacacgatagacatctcttcctacgaagaaatgtgcttcgtcttcttctaataacggttcaccataacgtgtacgtccctttatgatattttggtcagcaaatctcgtgccaaacattcctgctggaatatttgaacgtagacgtttactaaattcatcaaaacgtgtttcaagtgttttttgatgtgcttggaaaataaagtaaatccccactttagcagcttttttcaaaattgtatccaaagtgctattagacatcatcatcttatcattaattccttgagcatctggcatataaacaaaaattggctgattaggattttctggtgaacgtgaatttaattctccaagtaaatcattcataacagtattgtaagtttcttctgttgctattaaatcaaaactttcaatagctccttcaaaacgttggtcagaatcaaaaatgattcgttgggcttgtccttggaagtaagtcatattctgaacaataattgattccaacaatcgtgtctgagttggggtatcatccataattacaaaataaccatgttcttctggtataaacccaacaacatctgttgattccttatcaaaggcaagtggtaattgcatttgatttagcattcttattgtatagctgttaccatagaaatcatcccaatcaagttcatttggtaacattggaatagctttaggacgttgacctgtccacactttatcaattgtagcaacttcttcttccaaataacgcaagcgttcaatatcttcttcacccttacttggtaagtaaatttgaatttcataaggtacgtcatcacgtacttgccctcggccaaatatttcttgttgaatcaaagcattgcgtccaataatatccttaacagcgttgtcctcaactaagaaaagtgccatcttagtcgaaacgttacttgacatactgattttcaaactattagcacgtaaagcggttatgataagatagcaaccgagacttgacccttctcgtaaaatacggttcaagcttgcttcaatagtttcttccatcggactatctttgatggcatcaaaaccatctacaattgtgaaaacaactggtaacttctcacccgttttttgctcgtattgcgcaagagttgctacactatattcagcaaataaatcttttcgtctctttaattcactgtcaattcgcttcaagaatttaagaagtttttcttcctcatccaaacgcgttaaatcgaccacgtgtggtaaatcttttaatggcaacaacccatttgtcccaaaatcaaaaagattaaattgcacttgttctggcgtattaagacgagcaaaattcattattaatgtttgaagagcaacagattttccgaaacctggagaaccataaataacagtatgacttaattcttcgacatcgaaatcaaaattgcgttgggattgttcagatggaacatccatcattgcaaaaggtacagctaattttctttcgtcggaccaagaaacagttaaaactggagaagttatcttctctttcaacggtggtaaccaaggtttatcaggaatgttaacctctgtactttgtgcatagtttgaaatatagtcgactaaagcttccaattccgtctgatttttttctgattgaacactaagttcctcttctaaagcaaggttatcagttaagagctcatattgccctaaatcattaattaaccaaatgcgatcgtcaacttcttcttccttatccgacttattaggctgataagttgcaccgctccaagccgattggaagagttcataaatttcattatttccgacttgcagatatgcacgccctggttcaacgatactagcggcatcaggggttttaataatttcatttgaatcagatttatctgatactttcagagccaatttaaaacgtgagtttgaccaaatctggtcatcaacaactccagaaggtttttgtgttgctaaaatcaaatgaaccccaagtgaacgaccaatacgcgctgcagaaactaactctgtcataaattcgggctcgttagcttttaattccgcaaactcatcactaatcaggaataaatgcggtaatggcttagttggataatgaccaccatcagttgctgtttttccttgcttatataacttcgtatagccattaatatggttcacaccaaatgcttcaaagaagcgttgacgcttctgaagttctgctttaattgaggcaagggcacgcgcactagctgcaccatctaagttggtaatcactcccataagatgcggaagacctttaaagagattagccattccaccacctttgaagtcaattggtaaaaagccaacatcctctggtccaaaattaactgctaatgataacatataagattgcaaaatttccgattttcctgaaccagtagttccagcaaccaaaccatgcggaccgtgtgcacgctcatgtaaattcagctcaacaatatcctctttcccacgaagtcctaaaggaactgccaaagtcttagaggtgtctgctttcgcccaacggtcacctaatcgtaattcatcaactttttgaactttataaagctccaagaatgtaactgattttggaattgaatttttttcaatctcaacgtgatttaagttagctaatgttcttgcaactaactcataatctttgctttctggatatggtataaagcgttgtgctagatactcaccattgtcattaataatttgaccaacattttggttttggtactcaaccagagttgtaactgtttctggtaaaaaacgttgtgcttcttttatccaaataactgttacacctaattctgtcaaatcttcagccagatactcatttaaactatggccaaccaaataagaatcatcgaataccgtaataatataatgcggagcaaaacgaacatctttacttcccatttcacgtttaagctgcatacgcttttggataatttgatacaaagcgtttaaaacagcatcacgactgcgagcatcatgaacaattcctcgaacattacgttcctgaagtttaagatgaggtagaaaacgccactgataccaatcattagcatatgactcttcaggcaccaaaataacaaagttaatatcttgatagctgtgaaaaacagctaattgaatcaaaagattaaaaattgctggtcgagtcgtatcataagtaccaataatacctaaagttgcttggctaagagataatgtaatagggacatcatgttgcatcttatatttttcaacaatttttttagcaaaaattgcttgctcgtccttactttgttctttaaaagaagtttggagattcaaatttgtttcaatatcaccagttcctagagacacttgtaaaaaatctgcattataattcattcgttcataaatacgagaatcataatcaaaaaccattttggataaagtatcaatgtttggttgattgtagtttaaaatatctctttcttcattgtgataatgacttatctgtgaaatttgctttaagagataagaatcataatcctcgacacgtattaactcttgctttttataatattttttgtcttgaaaatactgtgtcatcgtcattccagcagtaagtagactaaatcctcccatgccaagcatcatccacggattacgacggctaactaaacctgtcaaagcagtgatagcaaacatcccaagtggtggtacaatggcacgtaataaagaattacgtcccatagatgctggttccattggactatccaatttaatggcatcactatatatagttggaataacacgtggacttcgatgataatctgggaaatcacttggaaaatcacttactggtgcctgaagtaaaattttatctggtcgtgtaaatttgggtttatcgtaaaatcgtattactcgccattgatgacgacgacgttcaatcaaataatcttcaataaaaacagaatccccaacattaaatgacaccgataaattatcactaatgcgaacaccattaacatatacaaccgaattagcatcataatcaataaatagcctattttgtgaaaacagaacaatcgtttctccatctaaatgaatatcagccgtatccatagatgataaaacaaaatctgtataaggtggataaaaatagagagtaaatatatcagtcttaggttttaagagatagtaatctacctgattgtcttgtattttatgcccttctaatttatcaccatttcggaaaatatcgccattttgaagactataacgaaccccttcaaaactaagaggaacatcatctgaaaattgcatatatgataacttatcagacaaacacactaaaaaggcttttgaagttatctcttctcccaaataatctcccaaatggtgatagtaagtcatattatcattttgaatcataaatcattcttccccacttgattgtgaacttgttgtttcgttgagctcatctgaaagctcactaatttctttttcgtattctttcagtttcttttgtttttctgaaccactcatatctgtatctgcttttactttttcatacaaatttgtataagcgtgtaaaattaactgcgtatctccaatattttgtgccacatcaagtgctttttctaaatctccacgtcccaaataaatccaatagtttaaaatcatgtcatctgaagattgtgtaattgtgttgagcaccgcttctgtttgctcagagctgagattatctaattttacaaagctagtcgctaaaacatacttggcagattttggaagtcgattgacactataagagtctaaagcatcaatcgttttatcataatttgttgccataaaagctgattgagcttttataaccgcattctttaatggcaagtctctcgtgtaagatctataagtgaaaacacctaaagttaaagttgctaaagttagaatcaccgctgtaactaacaaaattctccaacgttttttattaacctgtatattattttgcttatttttttgctctaatttatgaaactcttcactgacaaattgattaattgagtcgattgagtcgaaagcattaatcttttcagcaatgttttcacgaatagcatcaagcccttcgattgctaaatcaaaatttatcttaggtagtaaaattgaagctatcaaagctttataaacgttcaagtaatgttccgtttgaaacgtttgtggtgctaaaatattagtaataccataatgcaacagtttaacatcatttcctgagatataaatattctgtgggtgaaggtaaatgatgttaaaatcacttttattagtaacaatagcagccattttttgtgctaaagaataacgttccaaatctgtttttgcctctgcaatacaatctttcaagctctttgaaaactctgggatagcatacgaaagaacaagttctccattttctacaaatgaaatctcggcattaacataattttcaataaaagtttgacttttacggtcataatcagctggttgtacagttacagttaaataattctctttttctacaagtttaagatgattatactcaaatatcataagtttctatctccaaaatatccccatttccaagtggaaaattgactaacatttcaaaacgattcacagtaatatttttatttttcaagtgaagttcccatttcttatcagaatcttcattcagcccaagctgctctaaaatatttaattcttttagcagttcttcgagtctgataagggttaatccacgagaaatacgtaaatcaatttgcttattctgatactcaattgttatatcaatgttttcgaatgccataacgtatccttcccaaaaaaactccaaatattgtcatcaaaacaaaaaagcaaaaaacgacaattgaattcatatacgacttcttttgactattctcaacactggctactgtgtaactttcatcgacttgataatcaacaaattgcttttcatcaatcgactctgtatctaagtgataataattagattgttggttatcactagtaaaaagtcgactttcagcagtttctaacatctcttcttcatcttgatgttctttgtcaacaactttctgcgtcctatccagaaaaaggttaggggcataaagttcttcaatgctattacctgctgatttttgctcagtgttagcgatagaatccgtatttaaattcaaattaccgtcttctgctaaaacagattgtgtatttattaataaaaaaactaaaaaaactcccaatgttaattttttcacgactatatccctcgtataaatctcccatttatttacgtctaataattataccattttttttagcaacataccaatacccaaatcgcatataatgggctatttttaactaaaaaaacttgctaaattcgaaaattaaatattattttttgactaaatactttacaaataaaaataaaacggtataattttataaaaaaataaaatttaaaggagatttttatgaccgctattagcgtaacgccagaacaacttaaggaacaagctcaagtctacacacgttctaaagaacaaattgagcaagctattcaatctgttaacagcatgaatagccaaattgctgaagaatggaaaggtcaagctttcaacgcttatcttgaacaatacaatcagctttatactcaagttcaaaaatttgaagaattacttgcaagcatcaatcaacaattgaacaattatgctgaaactgttgcagaacgtgatgcacaagactctgcttcatttggacttaactaattttcaagttttctgcttaaaggtgaaatgggagattttcaatgcaatgtcgttgaatataaccacctttatcacaacatttgtactctaacataaatcccttgtaagcttaagcttacaagggatttttctattcacaaataaaccaaatactattatctgctagcttagcagtattggataatttttcatttccccctacacccatccgtgttcttcggcgattcttgtggcttctacgcggttgttggcggataatttgttaaggatagatgagatgtaatttcggacagttccgtttgagaggtaaagggtatcagcgatttcttggtttgttttgccaagtgatattaattgtaatatgcgtttttcttgttggctaagtgggttatcttgggtcatcatggtttccatgagctctggtgagtattcctttttcccagcaagcaccgtgtgaatggtcgtcatgagttctgatgttgagcgatcttttaggacataagcgtcaacacctgccttaacggctcgttcaaaatagcccacacgcttaaacgtggtcacaataatcactttcatttccttatgttttcgaatccattccaaaacatccaaacctgattttttcggcatttccacatcaaggatagccacatcaacattttcaacttgcaatatgccaatagcttgcgcgccatctcctgcttgcaaaatctcatcaacatcatcttccataagaagcaattgacacagcgcgtctcgcaacatggattggtcctcagcaactaacaatttcatcttaattctcctttgaactgatactaacttgaatcatggttggtttagcttgggataaaatctccacatctcccttgaccaacagcaaacggtcacgaatggattttaattcatttcctgttaagtcgtcaaaaccaactccatcatctgtaatggtcatcactaatttttcttggttttcaaaaaggtgaatacggcaagtttgcgcttggctgtgcttgatgacattattgcttaattcacgcaaaatcataccgatacttgactgcatcaagggtgccatggcttccacattcaaatcattttgcagctgataatcaatatctgtcatagcaaaaaactcattcaaatgctcaatctcttcgctcaccgttctgaatttgagattattgacaatgtttctgacatcatgcatggaagaacggctggtttgattcaattcttccaactcttttttgacaaggtcatatttgcctttttccaattgcttaagtgctaattctgtttttaaggtcattgctgcaaaaacgtgccctaaggtatcatgcaaatcacgcccaatacggtttcgctcattttcagccaataaaagattaatggtgcgattcttttccatgattgcttttcgctgaatttcattttttcgatcatccatccaataaactaaaatgccataattgacaacaggaaccaaaaaaatcattacctgtgacgataagtcatctgccaaactgacaccagcaataatcataaacagcattgctaaatcataagcgagaaatcgaaaggaagcgtagttatcttgaaatcgaaaaactagcaaactattaaaataaaaggtaaaccacatcatgccaccatctacataaatggtcatataaacaacataaagtagcataaaaatccagcaaaggtttgttaggatattttcttcaaaatgtgtgagaaataaatagcttagtaaaaacagaaaagttatcccaagtgtccaagctgggtaaccaaaaaagaatacccctaaaacggggaatgctagaaatgctaatggcatataaaataacggatgaatgcccctaattcttttcaacatcatttaacctcagttttattcttaatcataagcgctaacgctgctattattatgacatagccgagtatgataatcaaggacttcccgtttacctgtcctttttgagcaaactgtgtcactaattgattcacatgataaactggtgttactttagaaatcttttgcatccagtctgggaaattctcaatcggcatccatgaaccaccgataatggctaaaccaataaaagaaatatctccgacaatcgtcattaattgttgtgatttaatttgtgaaatcaatagcccaaatgctaagaaaagaaaacttgataccaacaacaaagcacctgctccaaaccaacgactaagtggcatgctcaccccgcggaaaatagctccaaataaaaaggtcgccacgatagaaagtaagaagcaaaacaagacacgaatcacttttaccaaataatactgccaaacagggatagaagaatgctcaatgtaagtcaaccaatagcttgtcttatcctcaacaagcatagctggaaatgagaaaaatccaaaacttgacatagaaaaagcagtcattgtcaacatgtaagctgtcacaagcactttttgttcttcaggattcgacgacagttccatacctgagaaaaacaagaaaaagaaaacaggcataccaatcgacaaaacaaaggtcatccaaaaacgccatgttttaatccattcaattttcaataaagcaatcatttttcatcctcctgtgtttggtcaaacaatgtgtttaataacgttttattttgaatttcaatatcggcaatctgacaaccttgctcttgcaatttctgccagacactatcaatttctttagtcatgaatgtcaccgtgtcgtttttcagttcaatattatcaatatgtggtaatttttccactatcgacaaaaagttttttggtaaagtcaactgtttttcgtgttcagcttctcgcatggcaaacggtgtcgtatcacgcagcaattttccatgatgcaagaccaaaatgcgttctgccgtatgttccacttcttcaatataatggctcgaataaaaaatcgttacgccctttgctttcagactttggataatctgccaaaaatgctgacgtgttgaggtatccattgctgccgttggttcgtctaagaaaagaattttaggttggctaataaggcataaggcaaatgctaataagcgtttttgtccaccagacaatttctctgtcaattgggctttttgttcctcactaaattgcaaaatcttatcaatttcttggtctgctaaaggtgtcttggcaatggacttgaaaaagtcaatgagttcagacactcttaacttttgcggcaaacgattttcctgtggtaacacggcgacgatttcttttaattgctgacttttcggtgctaaagcattgatgactatctttcctttgctgattttcaaatcacctaacaagcatgacatcaaggttgttttaccagcgccattaggaccaatcaatgccacacaatctccagcagctacttcaaaggaaatgtcttgcaaaatcggctttcctttaattgttttagataaattctcaactgttatcatttcattatctccaattttctcatctgtgataaatttattttatgaaaaaatagccaagctttttagctcataatgtcatgacatcacatgacttttgtcatgttttggagacaaaaaaagaagctgggtcaaaagtgctcagcttctttgtttacatagttattatttagtttggacttcaacaatctggggatagaccgttttaggtcagcaacaagaagttaagatttgctgagaaatcaagtttctgcgaaattaccgattcgctttttgctttttaggctcatgaataaagtctccactggagactctatttgtctcactcccttagttttccatcatgcctgcttgtaattgatacatgcgatagtaagtgcctttttggctaaggagttcgtcatggctgccagattcgataatcttgcctttgtccagcacgtaaatgcaattagcatcttgaatcgttgacaaacggtgcgcagtagcaatcgttgtccgaccttggcgcatttttttcaatgattcttgaacaatggtttcagtttcagaatcaatattagctgtcgcttcatcaaggataaggattttaggctgactagccacggttcttgcaaaagctaataattgacgttgccctgttgaaaaactcgaaccacgttcggtgacttttgtctcatatttttcaggtaatttttgaatgaattggtcagcatctacaaatgccgcagcggcttggacagcttcgtctgaaatatcctggtacatcttgatattggacttaattgtaccatgatataggaaagggtcttgcaaaacgagaccgatattacggcgcaactcttctttaggatactcacgaatatcaacgccgtcaagcaaaacttctccagactgaaattcataaaagcgcatgaaaacattgataatcgatgatttgccagaacctgtcgagccaacaaaggcaattgtttcgccttgatttaccttaaatgagatattatctaaaatttggcgttcaccgtcataagaaaagctgacatttttaaattcaatattcccagcttgcacggttgcttcgccatttttctgttcaggttcgtactgccgttcatcaatcaaatcaaacacacgaccagctgaaaccattgacgtttgtagcgttgaaaaattctgcgtcacttcaatcaaagggtcaaataatcgattaacatactgaatgaaagcgtacattaaccctgctgaaatcccaatttccatgccacgaaaaccaaaataagccattaaaatagcataagcaaggagttttaacagcgacatagctgggcgaagaaaaagactatctaacgccatggaacgattggcatagagcacatgctcctcattaatcacttcaaattcatctttcaaacggtcctcttgactaaaagattgaatgatacgtatcccttcaatactctcagaaagtttactgttaatatccgacaacaaagcacgtgtcttttcaatgactgcaaccgacttcttacgataaagattaaccaaaataaaaataaaggggagaaaaatggcaacccagcccgtcaaaacagcgttcaatcttaacatggtcaataacgttaccgtgaaaatgaaaatcgctgaaataaaactagacaaaattcctgaaaacatatcactgacagcttccgtatcattggtcaaacgcgacacaatcgaacctgctggcgtctggtcaaaataagccattcccaatttttccatattggcaaaggcatctcgacgaatgtctctgacaacactgtatgacacacgcgcaaaatagaaattccctaaatattggataatcgtctgcaagacatacatgagataataaccaaccaaaatcaacatagctgtctgattcatatcagtcaaaaaatggtcgataaagtaagaagcaatcaaaggaatgacacttcttaccaccgtcgtcaacaatagcaaagctaaagccaagactgtcaaaaatttatatggtttgagatagctcatgagacgcttaaaaacccgccattgatttgcattattcttcatcagcatctccttccatttctaattgttgagcttcataggtatcagcgtaccaaccaccttgttcaataagttcctcgtgacgaccacgctcaataatatgcccgtcttgcagcaccaaaatcaaatcagcatgaaccactgcacttaaacgatgcgccgtgataatcgttgacttattctgccgtgtttctttaagattttcaataatcgcatgctcggtcttggcatcaaccgctgaaagagaatcgtctaaaatcaaaatatcagggtcaagaatcatggcacgactcatggcaatacgttgcttttgcccaccagacaaactgacacccttttcaccaatcactgtctcaaaaccgtcaggcattgctacaatatcgtcataaacccttgctaatttagctgctgcttcaacctgcgccaaagagcttttcggattcccaaaacgaatattttctaaaatactcgtcgcaaataaaaattggtcttggggaacatagccaatcaagcgacgtaaatcagccaatcgatattctctaatatcatgcccgtcaagcgtgatttgtccctcttgcaaatcatattcccgcagtagcaagcgaattaaagttgtctttccagaacctgtttgcccaactaaacccaaagtctgaccttgttcaagcgcaaaatgaatatctgcaagcgtttcttcattttcatagtgaaaagcatcgatatcgtaaaccaaacgcccatttttaatcgttgggagtggattttcggcttctttaacatctgattcttgttgcaatagctgactaattcgctcataggaaaccgatccacgttgcaccatattgaataaaaaaccaatcgccatcaaaggccagacaagcatatctaagtaagtaataaacgttaccagactaccgaccgtcacatgaccagccgcaaccatgattgctcccataaataacgttaacacatagcttgctccgataaataaaagcaccaaagggtcaaacatgacatcatacttcatggtcgtcatatttttcttgaaagtcatttcattggtctcttggaaagactgtaattcatcatcttgataaccaaaagatttagtcaccttgataccagaaaccgactcttgaaccttgttgttaagctctgaaaaagccgcttgagattgactaaatgccttgtgcgtttgacgtcctaaacgactggttgcataagccatgaacggcaacggaataatggcaaccaaggtcatttgccaagaaatcgtaaaaaacatggtaattaaggttaccatggctgtaatcgtggcatcaactgctgacatcacaccaccaccagctaaacgtgtcaaggcattaatatcattcgttgcatgcgccatcaaatcacctgttcggtatttttgataaaaactcggtgacatttttgtgaaatggtcaaaaagcctaaagcgcataatttgccccaaacgataagacgttccaaaaatgtacatgcgccaaatgtaacgcaaaaaatacatggcaactgctgataagactagccacaataaatttaatagtaattcagagtgtgttaaatcgcccgccgtcacacggtcgataaccgttcccataactttaggtggaataagatttaaaaccgccaccaaactcagagaaataatcccaataagatagcgccttttctcctgacgaaaaaaccaccagagatcttttataattttcataaaacctgctttctagctgctattatacaccttggagtgaactccaagtcaagttatatttcctcatcaactcatcttagcattatttcacaccacgcaaactaaaacacgactcacgacttcaataataaaagagcaagacaactattcattggaaaatagtcatctcactctttataacctaattttctctttgatatttctgatatcgtttgacaaaccactgataagctaaaaaggctagcaaaccacccaaggtatttgtccaaaggtcatcaatctcaaaaacacgattagcattgtacagcaaatccaccacaatctgcgtagtttcaatgcaaagactgataataaacgccaataacgtagctctttgccatgttcttaatttcggacataatgctatcacgcctagcattaagggaaaaagcagaaaaatattcatcacattttgcgcaattacccaaaaaatctctaaaaatccgtctaattggctaaagccaacaaacgtgttaaacggcacaagcaagaaacgtaaacgaccgtaataaatgatatttggtgtttcaatgccatcaatggtcgtttgtgggctaaagcacatcaaacaaatggctatggcgtataaaaccacaagcacctttataatccgacgtcccaatggcgttaattcaacagtcttatccaaaaaccttgacatcattagtttgttttttcagcaacggctttttgacggtcacgtttcatagtatttgagcgcaactgtccacaagctgcatcaatatcagttccgtgttcttgacgaacgacacagttaaccccatttttcttgagaacatcgtaaaaagcagctacacgttctttacttgaacggctgtattggtcatgctctgatactggattgtacggaatcaagttaatataagacaacttgcggattttcttcgtcaaatcagccaattcttgcgcattttctggaaaatcattgacttcatttagcatgatatactcaaatgtcacacgacgatttgttgtttcaacgtaatattcaatcgctgcaaaaagtttttcaagtgggaatgaacggttaacacgcatgatttgtgaacgcaattcgttgtttggcgcgtgaagtgacacagcaaggttcacttgcaagctttcgtgggcaaaatcacggattttatgtgctaaacctgatgttgaaaccgtaatatgacgcgcaccaattgctaaaccattgtcatcattaatcgtacgtaggaaacgtaaaacattgttgtaattgtcaaatggttcaccaattcccatgacaaccacgtgactcacacgctcatcttgatcacgttcatcaaaatatttttgtaccatcatgatttgtgatgtaatttcgccacttgtcaaatcacgctgttttttaatcaatccgctagcgcagaatgaacaccccatgttacaaccaacttgtgatgtcacacagactgataagccataatgctggcgcatcaatactgtttcaatcaacatgccatcaggcaattcaaacaaatatttgactgttccgtcagaagcttcttgaaccacacgttgtttcaaaggattcacgcagaagttttcattcaaaacagcgataaaatcttttgagatgtttgtcatttcttcaaaagattggacacgtttacggtaaagccaatcccaaatttgtgtcgcacggaatttcttttccccgtgttcgattgcccattcaatcaattcatcacgtgttaaaccgtaaatcgagggcttcatgtccttagtttctgtttgcattctgtaaataccaaatccttcctatttctcttttcggcgaatcacaaattgttttttggccgattgaatttctttttgttgttctcgtttttgttgacgttcaccacgtacttttgtatctttacgtttttggctcttaaaatgtttatttgccgagcggtcagattttttaggttctgatttctttttctgtgatgagcgtttttgtgatttatgacgtttcgttggcttatcgtcgtcagatttaacacgacgaggctctaaattttcaagcacaaaataagcacaaccaaaattacaatattccttaatgtaatcgtctagacgtgagatgcgatttgttttcttaacatctcggtcatccttgtaaaatcccttcaaacgtaactgttcatttccccaatcaccgacaatataatcgtattttagtaaaatttctgaaaaacgttgactaaaaacagttgcatcaaaagcattcttctcattttccaaaattaacaattcaatatcatcactcttgacacggtcagagaacgccacaaattgcggaccaggaaatttattgtaattgtacatttcaggagagatatcttttctcatcggtctcctctcttaatcgctaaaattcatattattttttaaggtaggtctctaccagttcacgtagtaattcgggaaaaagtaactctgcttggtgagattttatggtctcaaaataacgtgcaaagtaatattggtcaactaagactaaactgatagtgtccttttcattcgtaacctttttattatacactatttttccatttttgtaatcaaagccgctagttaaaaccctaccaaattcctttccgcgaaagcccatgccacggatttgttgattagctaacaattctgcttgtgaaaagacgtcttggcaaatcgtcgttaattcgtcagtcgtcacttctagtcttgccaaacgcatttgatgtggtaaggaatggtgtagtgtatccttagtgacctttttagaaaatggggtcaccactaaaccagaatttatcatggcaatatctgcattagcgtattctttcattgctgccataacgatttgacatgactcatcaaggcttaattcatggtcaaaagatttgactacttcttggcttaacagtttgcgaccattcgcttcaactgtttctatccattctttatcaccaggtttacttggcatatgactcgtttcgtgggcatgaatagtgatatcgctcagctcatggttctcaaaggtcaagttgatttcaccagcaaactgaccatattttccagcagccgctaaataagtgccgttaagacaagcaccgtcctcaaagacatgatgcgtgtgagcaccaataatcaagtcaatttctggcacttctgcagtgattttttcatccaatggcaaaccaagatgactcaataaaatatggaaatctgctgatttgacctctggaatttccaaatcacgctttaagcatgtgattgggtccagcacttgccaaccacctggatgatacgttaggtaataaggaaaagtgtaggctaaaaagacaatctttgtcccaagagctgtctcataaatcttgtaaggcttagcccacgttggacgcccagcttcatcctctaaatttcctaaaatcacatcaaaattggcactttcgtagacttgattgagcatcgtcttagccagtccaatgccttcgttattcccaattgttgcaaaatcaatgcctagctcattcatcaattgaacattatattttccttgcgttgcatcggtcatcggatgccaacgatcaatattgtcaccaacatcaatcttgataacctcagcatcttggtcagcataatcttggcagaatcgttttaattttggataggtttcaaaatgcgaatgccaatcatttaaatgtaaaatcgttagcttttctgtcatagttttattatagcattttccgcgtaaatagtgatattctagcgtttttaagccatttttatcacaaaaaaataagccagactttaaaaatctaactcatcctactactttttaaggatacattgtccgataaatcgttttaagcatctttcttacttcttttttgacgatattgagtaatttcgtctgttgcgtcgttgttatagcaacatcatttccttgagcatctcttaccgtttgataagcgatattaaaatcaccatctaactcaaagtaaaccgacacttcttgctcatcttcagtcgtttcaaatgtcacaaaaaaggcactactatcgcttgatgactcaatcgtaatcgctggcgtaccagttgtcgtgagcgttacaatccgattatacatgatgtaatcaactttatccacttcataaccagcctcttcaataacagttacataacgttgactgttcattaacacatctagctgctcaaataacgttccatgttcataagcccttttaaaatcgttacggcggtaaacatgatagccaataacagaacaaactgtcgtgataccaagtagcgttatcactaccaataaccgcttacctttagccgacatgcctacttctccgaaacttaatcatcattttttacatctccttttactctttttaattaacatcctaaatgaaagccctttaaaaaacatctgtacacacaaactgcactagttaaaactaatgcagattatcatatgttattctgtttcaagtaaactttgcgaaacaatagaagctagaactccaccaacaattggtgccaagatgaaaatccaaatttgacttaaagcatctccacctgccaaaagcgctggcgctaaactacgtgctggattagctgacatacccgttactggaataccaacaaaatgaattaacgtcaaggtcaatccgataaccaaacctgccaactgagcattgccttttcgactcgaagttactgttaaaataactagaataaagataaaggttaaaatcacttctactaagaagcctgtcacaagactgtagccatccgcaacaacattttgccctaaagtagcattatcaccagtaatggctaaaagtgcaaaactgccaagaagtgctcccacaacctgtcctaaaatataagtaccaagttccttactatcaatacgtttattcaagtacattgcaatcgaaaccgctggattcaaatgcgcacctgaaactgtaccaatactgtaagcagaagccacaatcgttaagccaaatgccaatgcaatcgacgcatagccaacaacactatctgctccgccacccaagacagctgctcccgtcccaagaaaaaccaaaacaaatgtcccaattagttctgcaaagaatttttttgacataaaaatctcctccttaaaattatgtgtattataacacttttcttaagaattcgtaaataaaacgactcgttaattataatcattttaaaaattagcacatttgcacctatttaaagcattatttttattaaactaagcataaaaaatgaatcagattctgtaaatccaactcattatctactattaaaccacatgcctatcttcttgttttcttgcttgtttaatgtgtttaaaaaacatataccccacaccctgacacatccaaacaaaagcataacagagaatccacattaaaaatgttaaccatttcatttccattgtctgataaacaccatcgctattaatcgaccgaataaatatcaacaaagtcacatctaaaaaaataaataaaatggcaagattaaaccaaatcacaaatcgcttttgccagttcgtcataactccctcctatctattgttactaatctactgctacattttaaggaaattttactcaatgaagcttaagaaaaaattaatttaaagtgaacaaaaaacatctccgtattcacagagatgttttcgttttaatcattgtttcgtagatagtcaattgcttcttggacggttgttactgggacgattttcatatcggtatcgaggtctttagcagcttcgacagcttcttcatagttcgtttttgcatcaggatcttttttcaatgtttcctcatccacagggttatttggaacaaagaaaatatccgcaccagctttagcagcagcaacaactttaagtgctgcgccaccaatatccccgactgaaccatctgattcaatcgtacctgtaccagcaattttacgacctttacgcaaatcttcactatttaattggtcataaatatcaagcgtaaacatcaaaccagcacttggaccaccgacaccactcgtatcaaaatcaacatcaacatctgatgacaccgacgtatgatctaccaaaccgattccgataccattttttccatttgacaattcaataatttttcctgtggcttcttttgcttcgccgtctgatgtatattgaactgttacctcagaccctaaatccaaatcagccacataggccattaattctgccgagctgttaaatgtctgaccattaaccccagttaccgtatcagcgatattcaaaatccctttaaacgtcgaattatcactaacatttaaaacataaaccccttgataatcaagcgttgcttcctttcctgctaatgttaaggcttgataagtcgctgtattttgagaggtttccatgtaatactcattgatacgaagataatcagcattgctataaccaccagtcacatctgcggctgtcgaaatttctgtgtagggagttaaccaagcataaaccaattgtgccaaggtcgcctgactaaccgtgacagctacaaaattataagagccatcttcgtcatcttccttattatcaaccgttaaaacgctacgaatatcataagcaccaccaggcatttcaatatagtaatcaagcggatacaacaagctaaatagtaagaaaacaatgcctacaacacctaatatccaccacttaaagcgatataaaatacgacccaactttttcaaaatctctttaaatctttttaagattgccatatttttcctccacttttttgacaacacttgttggcacaaaatctgaaatatctgaatggaaataaatcaattcacggatgcgacttgatgagacatgaaccaaatcaggagagctcaataaaaaaacactctcaatctctgacgccagataatgattataaaacgctaaatcagcctcgtactctaaatctttcccattacggagaccacgcacgagataaccaacttctaaacgcttggcaatatccaccaccaaagaatcacgcgctgtaatcacttttacgttcggaaattcttgcagtgcttcttctaacatctgccgtctctcgtcaacgctaaagaagccattcttatctttattgtaaaaaatgcccacaaaaagtgtgtcaaacaacttgcttgcacgcgctatgatatcaagatgcccatttgtcacagggtcaaaagatcccgtaaataaaccaattttagccatattgcctccattagtgataaaatcactcaattctacctaacatataccgtaaccttactaatgccatatgttttttgtttccagatgccaaaatttgaaatttcttctggtaaatcaacagccttatccgtctcacaaaccagcataacatcctcagacaaaagccctgcttcttctaattccgtaatatttttgacaatttcttccttagcgtatggtgggtctaaaagcaccaaatcaaactgtccactaacaacgccaattgccttattagcatccatttttaacaagtgaaattgctgctcagactttgtcattttgatattttctaaaataatagcttgcgcttgacgattgcgttcaaccagcacagcttcatccattccgcgtgaaatagcttcaatcgctaaacttccactaccagaaaacaaatctaaaacacgtccaccatcaaaaaatggaccaatcatattaaaaatagcacctttaaccttatctgttgtcgggcgcgtaatttttccatctagcgtctttaaaggacgcccaccaaattttcctgctacaactctcataacaaccattatagcaaaattcaaataaaataccttaaaaaatgatcaagtcatctttacactaaaaatgagatttgatatgattgttgtgataattttaattgtcaaagttttttaggataaaggagttatgatgaattttaaaacattctttaaagacaagaaaaatcttgccattaccattttatcggtattattgattgctagtttttctagtcaaggtaaccaaagtcaagaattatcccaagcagaggataagattgaacagcttagccaagatgtcaaacaagccaaatcagacttaaaagatagccaagatgaactggctgattttaaagaagaaaacgctgattacattgaagtcggcaaaaaagaagttcaaaagactaaagagattgaaaacagtgcagaaactgccgtaaaaaatctcgagaaagaccaaacgcaggctaatcttgatttagcaacaagtaaagttgacgctgttacagacgctgacaaaaaagagaaatttcaaaagcgtattgcaactgtcaaaacagccattgaagctaaaaaagaaaaagaactagaagataaagcagaaactgcggttaaaaaccttgaaaataaccaatcgcgtgataacattgatgacgctaaaaataaagttaatgcggtaaataattcaactaaaaaggaagccttcaacaaccgtatcaacgctgtcgtttcagctatcgaagccaaagaagccgaagctgctaaacaagctcaagaacaagccgctgctgaagctgctgctcaacaggcacagcaacaacaaaaccaagcagctgcccaaccaggagataccacaacagtttacattacaagaactggtagccactaccacctcaatccaaattgccgtggcttaaatcgctcaaaaagcactacaccagttagcttatcagaagcacaggccttaggcttaacactctgtggttttgaataatagattattttaagtcgttagagattgctctagcggcttttttatagtattttttacgcaaacattttttgcttaatttttccttaaaaagagatttacagaattattccaaaatggtattcttttagtgtaaaaattttatcattcaaagttttttcaggaggaatcaaacatgaagaagaaaatgaaactcgccatattattaatggcaactgtcatcatcggagtctctcaagaccaaggatttttaacaacatcaatcgaaaacaatcatgttgttttagcggatactaagtctaaaagtaaaaccaccaaaaaagacgataaagctactaaagcagcaaaaaaagctgttaaacaacttgaaaaggatcagacccaagaaaatcttgatttagctaccaaaaaagttaaagccgtaaaaaataagaaagtcaaaaaacagcttaaaaaacgtatcgcaactgtcaagactgcgatagagacacaaaaacaagaagagacagctcaggcagcggctgaaactgctgttgcaaacttagaagctaatcaaactcgtgaaaatgttgacgatgctaaaaataaagttgatgcggtaacagacacagctaaaaaaggtgattttaacaatcgtattaacgccgttgtttcagctattgagaataaagaagccgaggaagcggctcaagctgaagaagcaagaaaagccgaagaagctagacaggctcaagaacaagctgcagccgaagaagctgcacgccaagcacaagaacaggcagcggctcaacaggcacaacaacaagctgctagtggatactctagagatgctcgtggcagatggcatcgtccaaatggacaatacgcttcaaaagctgaaattgctgcagcaggtcttccttggtaagcaatttaatttaaataattttacaaaagtcgttagagattgctctggcggcttttgtatccccaaaaaagccgactagttatcctagccgacttttcttagtccttaaaataagatttcttctacttaaagaatattttcgtaagtgtcacgaacttcttttggccaaacacttgattgaacttctccgatatgtttcttacggagcaagaacattgccatacgagattgaccgataccaccaccgatagtaagtgggaagagaccattaagaagagctttatgccattctagttgcaaacgatcttcgtcaccagtgattttaacttgacgtttgagagcttcctcgtcaacacgaatacccattgatgacaattcaaaggcagaatccaaagcttcattccaaacaatgatatcaccattaagaccgtggtaaccattttctgattcagaagtccagtcatcgtagtcaggtgcacgaccatcatgacgttgaccatctggcaaaataccaccaataccgataaggaagattgctccaaattctttagcggcagcattttcacgttctttcggtgtcaaatctggataacgttctaccaattcttctgtgtggatgaatgtgattttcttaggcaaaacagcttcgatatcaaaacgagcttcaacagccaattctgtcaaacgaatagccttataaacttgttcaactgtttctttcaaatattcgatgttgcgacgaccatttggaataactttttcccaatcccattggtcaacataaatagagtggattggatctaattcttcttcgtctggtcggagagctttcatgtgtacgaaaagcccttctccttcattgaagccaaaacgtgctaaggtatgacgtttccacttagcaagtgaatgaacaacttcatattcagcatcaggaatacgttttacgtgcactgatacgggattttcaataccattcaaattatcttgcataccatccccgacctgactgagaataggtccttgcacttcaacgatgtcaagtttatcaatcaaatattgagtgaaagtattcttgacaaaagaaatctcctgctgttgatgaataaagcttttcttcatatgctcctccttaaaaattttttattgaaataccaaaatgataaataaagatagtgagataattttgtatttcgtgaccgcttttacaacgatagagctattatacacctaagcttttaaaaaataaatacttttttgaaaatttctacaatattttttgagtttatgttagaaaaccttacatatatttggaataagtcaatcatatcaaggaatttcagctatttttaccccaaaaaaatacaagaaaaaagacctgaaaaagttgtgtgtgcaatcttattcaaagtctttttatattgttaaaatgattcttttttaataactgttataattttcaaaagttttctaaaaaatcgttttgctgccgtctggtagatatttcggtttttgaggtaattttgcatagatataacagcctctcagagcaaacataagagtaactagcccaacaaagtaataccaaggattattactaagggagaaaaattgcggactaattagtgcccacatattccatggattgaaagacataatagccaccaaaacaaggacaatattcaactgccagcttgctccaatacgtgtgccacgcttttcccaaaacagtcctggaacagagcagataataacttgcgtaaaaatccagaatttaaacatcgagatatcatgcaactctactcgcagaaggttaaggctgacaaagaaaattaagacttgtaaacagcaatcaaaaattgcttttttgagagtcactttatcgccccaaatttcttttctttcataggtaaccgctcgccaaagacagtacaattcaaaaccaacccaaacaatctcaccaattacgcctaatagaaagaaccaaaaatggtgataattttgataggctgctaaaaacacccagattcccataaaatctgctgcacaataaaaagtgtgcatccataatggataaggaccacttttttctctatccaccaacacgaaagaataaatatagactaaaaatcccaacacaaacgtgataagaacagttgttaaagtcaacatgaaattgggcgcaccaggcgttaaagctgtcacaaaatcttgtaacgtaacgtcaccttgcggatacgcattaaataatgtgtcaaaaaccatttgaattctccttttatctcttcttgttgaagattctacatgtgagtattataatgaatagcaaatggcaaaacaatgacagcttttaaaaatctgggcattgttccacagaatgtgaaaaattggggtatcaatatgaaacgaagtgaacaaaaagcgcgcacgaagtataacattcgtcaggcgtttatcgacttattacagagaaaggaaatggacaatatcaccataacagagttagccaaatcagctaatattgaccgtaaaacgttttatttgcactatgatacaacctttgatgtttatcatgacatcattgacgatgtcagtaatcagttagacgacatcctcaagcaacagaataatttcgatttttttatcttttttaatgagttgaatcaagtcatgcaagctaatttcaaattttatcaaaccattgcaaagcaaaaatcttacgcctatctcatcaaagattttacagatattttagaaaatggtttaactcactactacctttcttctaatcaaacaacatcaaataaaatcaaaatcagatacatttcaaatggcatcatgggtgtctatatcaactggttggcacagccaaataacatttcccaagacgaactcgttcacatcttgagtgacttactagaaaatgatattaaacatttgaataactaaaagggagtgagacaaataaagtctccagtggagactttatttatgagcctaaaaattaaaaggcgaatcagtagtttcgcagaaacttgatttctcagcaagtctcaatctcttgttgctgacctaaaacggtctatccccagattgttgaagtccaaactactgcgtcttgtaaataataactatataaacaaagaagctgggtacttttcccagactcttctttattctttatcattcgttttgcgtagtaacatcaagaaaatgaaagataagatgattaccgccaagccaacgaataaataattaaattcatagtctgggcgcaatatgattgtaaaaatagctgttccaagaggcataaagagcaccgctattgtaaagacaattcccaaaacacgccccaaataatcgctatcaacttctctttgaacaagcgaaaaagaatgaatgttaaagaccgtcaaaaagatgctacaaaaagctggtgatagcgccagaaaaacaacatttggaaaaatatgatacaaaattggtgctaaaccaagaaataaaccagcaactgccaagaaagtcattaacaagtcagttgataattttttattaaccctaccgctgataagagcaccaataagcccaccaaccgcttcagctgtcaaaaatgttccgtaaatattctcagtaattttcgggaacatttggttgctgtaaggcagtaataggttataagcagccataaaaaaattcacagaagccgatagagcaatcaaaaccgaaacttggcgtttttgtgccaaataacgaaagccactgattaaatcctgaaagatactagccattgaaaaatgactgttttttgtattttcttctaaaatcggagaaacaaaggctacaatgatgcttgataatataaaggaaacaccatccaaaagcagagcaccatgaatacctatcaagcgataaacgccgaccgcaacgattggaatcacaattttgacaaccgtagccgctgtttgcaagtaagaatttagtagagcaatattgtctttttccaccacttctttcgtaaaagcgttataagcaggtgttgaaaaagatgataaaaatgccaaaaacacattggctgcaataatcgcataaattaaccatgtattatcactgataaatgacaaggctatacaagccagaccacttaaaaaatcactcaaaatgatgattttctttcgacgaaaacggtcagcaatcacaccaccaaaaagattaaaaaggactcccataatgttttcaagtaattgatataccccaactaacaccattgaattcatattcaagctagctaagaatgaattgttaacataatcaaataaaacgtccccaatttttgaaatggcgctgcttgaaacaagcaaactagcatttttctgttctacttttttcatataataaatctcccccattcttaaaatagtatataccttcaaagtattttttgcaatattctttcaattctttttaaaataaaacacaaaaaatcttgcactttcgcacaagatttcacgattttatgttcgaatcaatcaaggtaattaattcttttgtcatacggcgtggtccacgaatgttagtgacaccacattctttcagcacagcgattggaaattggctatccgaaaaagtttgcaatagctcaattttcattaattttttaattgatttttcttctcgataaccgctatttggaatatcggattctaagacacggcaaaggtagcgaagggcgcgtgttggtgccgtaatataaatggcaacataatcacccgctttaatactggctttttgtgtccaattaataatcgaatttgcagcaaattccgcatcgatatcgtaatatttcagattggcagggataatccaataatcaggcccagataagctcccaagacttttccctgcgactaaagctctgctattttccaccaaagaaaaaagtaaatcatccgaaaccgtctcgtccaacactagcgacacccacgatttcttactcatatggtaagatgggtaaatgccgcttatttcaagcaatcgaggcaagtctttggggttaactttgatattgataatctcgattttctgttccaatgcttcttctgaccacgtttcatcgcccaaatccaactttccacgcgcaaccgtcataatcaacgcataccacttatgattctgcgggtaacggtaagatgaaaactcaggatatttttcaaaaggatggtcatacatgtcgccatatgtcgcttgcaagtagtgtgcgagacgattggtttgtggattgagaaatggcagagcttcaaagcaagctgccgccacacgttcaagcaccgcaagataagcttctctgacttgcccaacaaaatttcccattgcttgcgccacatgaatggcaagatattcctcgttcaaatcagtatcaatcacatgagttgacacctccccacctgccgcaacatgaacacgcacttcaaaagcgccgtccaaaatagtttcgcggaactcataaccaccctgtgatttctgaaaaccaaacggtaccaagcgctcaaacaccacccgcttcttcctaaaaatatccgattcaaatgacataaggactcctttcgtttagcataagtataacaaaaaaaggctggaataacattttccagccctttcttttcatcattgaatgaggtaatattctcgtaagagttttttttcaatatcaggttccttctgtcttacgaagagcttgcttgaggataaatttttcgaaaaaattaaattgactaattttatgagttttatctccactttttattcaaaaataaatattggctatttttaacaagctcataacttcttaacgaatgtgttaaataatcttctctccgaattcccattttatctctcatagataaaatagaagcgggctttttaaaaaattgactaagcttatgagttgttatctcacctttgtaatatgaaatattttgttctagtacttttttaccattagtgggatcccaaaccataggagcttgtctagaaagaaaggatgaaaatgctgattcatctacaatatttataccattatagttatcactatttcctcgcattgtagaagtaacaaatatcttctctactcttatatcatctgcgctattcaaacgtaaatcactaataaataattcctttttctctaaaaaatgttttacatttctcgaaaatttccttaaatactgaaaaatttgacattgctgttcagcatgttctttaacagtatagggaaaaggaagagtcttacattctacgaaatatatagttttattaattacaaatatgtgatctatttcatagtcttctccatctagattatcttttatatttgatacaaaagttatttttgcttctttcaatttgtttgcaattttattctcaaggacataaccttttttagataattcgctaatttcacctaagtgctttgaaaaattcgatatgattgcatatgcaatagaagtaccttcagatattgatggaactattattaaactatcttctaattcaatgaaaggggtatcaattaaatcgtatgatgcattgctaaaagttaaataatcaataattttttgtgagtagtctttagagacattaagaaaacgagctaatttattaatccattctatcttcttttttacgatacacatcttataaagttgattaatcttactagatttttttaatttttcatcacatagttccgagatgtataaatatgctttatgtaggtgatagagtgagattcctcctaattccatatttttccaatcagttccaaatatctttgttaattcttgtacggaaaacaattcttgactgttttttgttagattcaaatttgatctatgtaaattactaactaaatggttataactactattcctagaccccttctccctaaaattagaaactaacacactctcattaaattctctgtctaatatttcaatactaaatttgtcatccaacgagacattaatttgagaaaatctaaaatattccataatatctttaatcgattcatatgtatcataaaaagtaaaatgctcacatactgtattcacatctctctcggagtagatttgatgagaaatatttttttctttatcgatgaacataaaatattttaaaatctcagccgcataaccttttaaaatatctctaatatgcgataatttttcaaaatcttcaatatcactttttatcaattgattactcgaataatctcttaaaaccttttcaagacatactaataataaatttatactaagctttgattttataacattttcttcaaaatattcctcccttttttgtaaaaaaagtttatataactggttcaacattattacttgcgtatagaaatcctcccaaacactaatatcttccttagaaaaattatgtcttacatagttatttgttctttttaacaaaacttccctatagtcatgaatttttccgagacttaaatcaccaacaatattactaactttcaaaatatgaattatatcttgaattgattttccatctaatttaagaagaaaatcgttgcttagtctatctaaacttttgttagtttttattttaactaatccatcatattcatgaagattataggaaaatttttcaatcataatttttacacctctttcttggtattttccataaacttttgtaaaatcagcacattgctacaacaaaaactttttatccaattaagtcaattttataatatctattcgctaaactacaatcaataatttcttcaaaagattattctcaaatcttcaatttatttttacaatataccaaatattctaaaatccattagattatttaatttttatactttgttctttttaaaatactcaaaaacttcctacagaaaactgtaggaagtttatttatagctcatttaaatagactatcttccaacttctccatctcacttaaggttgtatataataacttatttcaccaattttttcatgtcttcgatacgagcgactgttgcgtcgtatttagcttgatagtcgacttgtttgtcgcgttctttttggacaacttctggtttagcgttagcaacgaatttttcgttgccaagtttgcgtgcaaccatatccaattctttttgccatttagcaagttctttatcaagacgtgccaattcttcttcaacatttagaaggtcagcaagtggcaagaagatttcagcacctgtgataacgctagacatcgccaattctggtgcttcaatggcagaagaaatttctagtttttcaggatttgtgaagcgcttgatatagttcacattgctgttaaagaagtcttccaattctttatcacttgttttcacaagaagtgtgattggtttacttggagcaacattcacctcgctacgtgcgttacggacagcacggataaggtctttaagactttcaacacctttatgcgcagcttcattttcaaatgctggattaactgttgggtattcagctgttacgattgaaccttcagaaatttgttcaaagatttcttcagtaacaaatggcatgattgggtgaagcaaacgaagaatcttatcaagggtgtaaagaagaactgaacgagtgataactttttcgtcttcgttgtcgctataaagcacttctttagtcaattcaacgtaccagtcagcaaattcatcccagatgaagttgtaaaggatatgaccagccacaccaaattcaaatttatcaaagttttcagtaactttggcaattgtttcattcaagttgtgaagaatccagcggtcagttacgttaccagccgtaccagcaacaactttgtcaacatttgcgctagcttggtcaagtgtaaggtcttcatcgttcatcaaaatgtaacgagaaatgttccagattttgttaatgaagttccaagcagcatccattttttcgtaagagaaacgaacgtcttgacctggtgcagaaccgtttgataagaaccaacgaagcgcgtcagcaccgtatttctcgataacatccattgggtcaataccgttaccaagtgatttagacattttacgtccttgctcgtcacgaataagaccgtggataagcacgttttcaaatggacggcgtcctgtgaattccaatgattggaaaatcatacgtgatacccagaagaagatgatgtcataaccagttaccaatgtagatgttgggaagtaacgtttgaagtcttctgcttctgtgtcaggccaacccattgttgagaatggccatagtgctgaactaaaccaagtgtcaagcacatcttcgtcttgagtccatccgtcaccttctggagcttcttcaccgacatacatttcaccttcagcattgtaccatgcaggaatttggtgaccccaccataattgacgagagataacccagtcgtgaacgttttccatccattgtaggaaagtatcgttgaaacgtggtgggtagaattttacttcgtcatcagtgtcttggttagcaatggcatttttagccaattggtccattttaacgaaccattgtgttgacaaacgtggctcaactggcacaccagtacgttctgaatgaccaacgctgtgaaccattttttcgatttcaacaagcgcaccgatttcttccaattttttaacaacagctttgcgagcttcaaagcggtccataccagcaaattcaccagcaagttcgttcattgtaccgtcatcattcatgacgttgacttgtggcaagttatgacgttgaccaactaagaagtcattagggtcgtgtgctggagtgattttaactacaccagtaccaaattctgggtcagcgtgttcatcaccgacgattggaatagctttgttaacgattggaaggataacattttgaccaatcaaatctttgtaacggtcatcatttgggttaaccgcaacggctacgtcaccgaacattgtttcaggacgagttgtggcaacttcaaggctacgtgaaccatcttccaacatgtagttcatgtggtagaaagcaccttcgacatctttgtggataacttcgatatcagaaagggctgtacgagcttttggatcccagttgatgataaattcaccacgataaatccaaccttttttataaagttcaacaaagactttacgaaccgcttttgacaatccttcatcaagggtgaaacgttcacgtgagtagtcaacagagatacccattttaccccattgttgtttgattgttgatgcgtattcatctttccattcccagactttatcaaggaatttttcacgaccaaggtcgtaacgtgagataccatcttcagcaagacgtgcttcaacttttgcctgtgttgcaatccccgcatggtccataccaggaagccataacgtatcaaaaccttgcatccgtttttgacggataataatatcttgcaaagtagtatcccaagcgtgaccaaggtgaagtttaccagttacgtttggtggtggaataacgatagaatacggatgagctttcttatcgccagaaggcttgaaaacatcctcatctaaccatttttgataacgcccagcttcaacctcagctgggttatattttggtgaaagttcttttgacataatgtgtcctttctatttaattaattttttaacaattttagcaatacgttttttattatttcgatattgtagatataatttgggatgtaacaaaaaattaggttttttctgtctaattaattttcttagcaatttttttcgttttttttgcaagaataacagcgagcttgaatcaaaagactgattataaattctgttttctaatagattaatagtatttgacaaccgaacccattccttaggttcctgatttttcaatacatgtctctctacttctctaatgtagtcattttcaattgaaactagtgaatttaaaaaatatatttcatagactaataaacctacaaaagcaactataccaaaagatatttttagtaaattaaaagttgtagctaacagtattgctgttattatatacggaaatgcgtatagtaaagtaaaaatcccagccaactcattttcattctttggaggattaactttaatagcttttgttattgtaggttgaaaaataataagaaacattgatattatcgataaaatcacataaatccaagaactcttaaatgctaatatacaggtataaaaactcgctaatagtagtgtaacataaagtaatttatcaaaaaaagtcgagggcttaattcttatctccctcttagaacgttcccaatcatacttcaacaaaagattgacatataatgataatttatcaaaatctattttatcagtctcattatttagcaaatcccatatatgtccatcattcataaagtacatctttgaatttttgacttctctattttttccatatggatttatctgagtttttaatctagagattgccagtttttgttcatctgcagatacactatttaagtcaactaggatatctttcatactttttcgccattctgagcgttctttcgtaacaaaatccaaattattccttttattagcttgaataaatgtaagtattgtgctaataattgctcctactccaaccgcacttatgatagaaataacttgctcaacattcatcatctcccctcccactcactttttaatagtccatagcgcaataggtcacaacgttttccttgtgcgtctttgcggtcacggattcgagcttcgagggtgaaacctaatttttcagcaatacgttggcttgctttgttgtaaccataacattcaatttcaattttgtggagattgagtagggtaaatccaacttccaacagcgcacgcgcagcttctggcacgagtccttgcccccaataatctagatgaagcagatagcccatttcaagaacatcatcagcatggcgcttattaaaatcaaccgagccaatgactttatttgtcccttttaagcaaataccataaccagacggtaccttttgctcaacccagcgctttggcataatgttttcaagataatatgcctctgcttccacactttctgcaggtggaaaaccagctggccaagtcacttctggcaaactcgcataagcaaaaatatcctcagcatctgagaccagacgtgggcgtaaatatagccgttctgtctcaatatcaggaagtttactgtccttaatctgacctaaaattttaatcataagttctctcccattttggtgataaaaaatcgcccctgtctttcgacagggacgaactttttataaatccgcggtaccacccacattcgagtgactagcactcgcaacttgattattcagttacaacgttcagcaaccagccttaacatttgtacggatttctcaaccacaccgctttctgtaacaaatggtctttaagacacctctgaatgtttttattttaacagatttagtcagctaacgcaaatagattaagctttgaaagctacgccattttctttcaatttattaacagttgctggaccaattcctttaaaggccaaaacgtctttttcagtgaagtttttgaaatcagaaactgatttaatcccttcattgtaaagtgtttcaataagttttggtcgaatgccttctacggcagaaatcgctgaaaattcttccaaactaagagtcgcttttgaaacaacattagtagctactttaacagttgctgttgcagctgttttgataatacctgcgcgtttcaatttcaataagtactctttttttcgattctttttctttgccattttagtaatttctctcccctaaaagattatctggtaattcgtggaaaccttttccggctttataattagcaaatttgccttggataaatttgtaagcatctaacttactttcataacggatgtaggcatcagctgcgcgttcatccttatcttcttccacaatcttacgactagcttccatcgccatttcgttgattgcgatttgtgaatctacccaagcttcaaattcttttaaaaattcttgttcgtaagtcataaacacctctcgtctgatttcctaggtcatattataacacaaacattggcaaaaagagaagtttgtaaaggatttgtaacatgatttccacgaatcatttctttttacagggaaattttcagaaaaaacatcattttttagtgaattatcttgttttttccagagtttttaagtaaaatgttaaaaatattttgaaattcaaggaggatgtgttggcatgattttatcacaatttgaccatcagcaaacggcgattattaacccaggggatgtcatccaagctttgccagattttccaaagacagctgtgacctgttttgcaagaggaactttcgcacgaatcttagctgaatttcctcaccgtgaaatcgcaaaaacaagtgtcgcaaatttggaaattccaatctatgagctaaattttcagggtcaaaaaattgcttttttcaactcctatgttggagcaagtggctgtgttgctattttagaggatattattgctatgggcgctgaaaatatccttgtttttggtacgtgtggtgttctagatagcaatatcaaagaaacctcaatcattattcctacaagcgctattcgcgacgaaggcacaagctatcactacgctccgccagcaagtgaaattgcgctcaatcacacctatcgcaaacagtttaaacagtttcttgacgcgcaaaatatctcctatacagaaggaaaaatttggacaactgacggcatttaccgtgaaactcatcaaaagacggcaaatcgaaagacacaaggtgctatcgccgttgatatggaatgctctgcgattgccgcatttgccaacttccgcaagattaatcattttcaattcttttattcggctgacaatctagacgctgaaacttgggaacctcgaactttggctaacgatgctgaccttgaaaccaaagaccgtattgcaaacattgctttaagttttgccgttgaattattccgttaaaatcattataatagtgataactttttttccgaaaaaaggagaaacatggacattcaatttaaatcatttactgacgaagataccgttcaagccattgcgatttggaatcaaatcgtgaccgacggagtagcctttccacaaactgaaaccttaacccttgagacaggaaaagcctttttcaaagcccaaacttacacaggcgttgcctaccaagcggatactggacaaattgtcggtctgtatattcttcacccaaataatgtgggacgttgtggacatatttgcaacaccagctacgctgttgatagtcattttcgtggacaacatatcggtgaaaaactcgtccgccattctatggtgactgctaaaaaattaggatttagaattcttcaattcaatgccgttgtcaaatcaaaccaagccgcacttgccctctatcaaaaactaggcttccaccaacttggaacgattcctgcaggattcctcaataaaaacaatgagtacgaggacattattccacactattacgacttaaccaaactgcctgattaagcagattcacatcaataaaaagcgttctgatattacctttatggtaacctagcaggatgcttttagttattttgttcaagctatccgttcagataaaagtaatcagtatagcacaaaaataataattttcaagtcttgcaaaacacaaaatatagtgctaagattttatacagaacacaagatattgtgtttaatatgcagtttcaacaagaacgatttcttgccactacatagataatacttagagaaaggaggctatcttcttatttccacaataccataacttccaccaaacatttactaccattttctaaatagatactcaaatctatttctataactattctcacttacattagcatattggaggtgcattaccatcgtgattattctagcaggaatgataggagttggaaaaactacctatacttctcttttagccaaagaattaggcacaacagctttcttcgaacctgttgataacaaccctattttagataaatattatgaagaccctgaaaaatacggctttgctttgcagatttattttctaaataaacgctttaaagccattaaaaaagcttatgatactgataataatgtcttagaccgttccatctacgaagatgctctctttacgtatatcaatacccttcaaggcagtatcagcgaacaagaatataagatttacctagaattgttagataacatgatggaggagattgacggacttcctaaaaaatcccctgatttgctcatttacctcgaaggcagttttgaccacatcatgaacaacatcaaaaaacgtggacgtgattttgaacagcctgataatgctaacgggctcactgattactacaaactccttcacacacactacaacagctggtatgaaaactaccaatacagtcctaaaatgaaaatcaacaccgaccatatcgatgttacaaaatctgaggactgggcaaaagtttatcaaatgatccgtcaagaaatgaaatcaattggaattggagattaacattttttgaaaaaacaattatcacttaaaaattctttcaaccttgcatggaatcgcctaaacactaaagaaaaaatgtttgtcattatcgcttttctggcgtcacttagctttaccctctatggcatgttaccgacactagtcacaggtgattttaccgccttaaatactctctcaattatcatgtcaatctttggctttatcggaacatggactttggcgctccaatggcagcacacctttaaggcaaatgggattcaaaacatcgctgggattttagttgctggaatgcaaggcatttacggtgatatgtttacaagtttttattacctcgtaaccgaatttatcgggcattacagttggaaaaaacgccgtaatgataatggtgaacttgttgttgataaaaaattcggagccaaagacgtctttctcgctatcttcttttggacaattggacttggctttctgtcttactggatgggtgggcaaaaaattgtcctcgatgctttgacaaacggactatcattcactgctcaacaacgacaagtaaaagggcaccttgatggctactacatttggcttttggttgactttcttagttttatactatttatttccattggaaaccaaatcgtcgctttcagctacctcggcatgtttgctcaaggattggttgggattatgatttggaagaaaggcaaaggacaagcttaaatttccactaaaaaagcctcacgcgaggcttccaaaacatctttgccgccaccgagaattgaactcggaacggagcattaccattgctctattataccatttaactatagcggctacctacttatagtaacatgaaaccactttcctagcaagaaaaagttacccaactcattcttgtcaaactactccactaaacctgcatttcatgtttataaataaaagcttaactcgtttctgagttaagctttttgtgtaacttcgtgaattgatttgacaggttttacatggttatcgtgctcacctaacattttttccatccaaatcatgtcataccaatgattaaatttatagccagactggtgaaattttccgactaactggtaaccaagggcacggtggaatttttcactgccatttgtcaaataagcatcttctgtctcagttgaagcaatgcaagcattgagattcaaaattcccatttttatcaagtattcttccaaagcacggtaaatttgacgtcctacaccttttccacgcgcagccttgtccaaatacaccgttgcctcagccgaccaagcataagcagctcttggatgaaaagatgacgcgtaagcataacccaaaatctgccctgcctcttctgctaccaaatacggataaaaagccataatagagcgcattcgttcctgaaattcctctaaacttggcacctcatactcaaaagtaatagccgtcttttcaacataataacgataaatagcaagtaaatctttggcatcctctaaacgagccaaacgaatgataactgtcatatttccaaaaataccctctcgaacgtaatttttcaccagtatatcgagaaaatcctttactgtcaaaaataaagtgacatctttcgttagctattttctactcttaaaacgttatttactctgttcaaataaccaatcacgcatcagcttgccattgcttttgtccgtatttgctatatgtaggagtagttgatttcaggcttttgcctaaaatagaaatcacttacgcactaatttcactaccgcttctgtccgtgttgtctggtccttgagaatacatttttttatcctcgtcactgttttgaggacacaatttatctgtttctagtttagcatttttacgtttacttttgaattgttttccatccttgttttgagtttcacctgttttgaatattatggttaacattgcaggatcaatttctccgtcgctattaactccaccaacaataattttctcaacaatactttcaaaaactgcacgatcaaactctgtaagcattttctgcgaagatagcaagtgcttaaactcagttagtcttttctttacatcgatttctgattttaaggttgtttcaatatttaccttctcttctgctagaaactctttctctgaggaaatttcgttgtacttttcattgtatatggtatcgctaattttcccttcgagccttagatttacaagattttcctctttttttagtaatgttcgaagtttgtttgtaatcctttttagttccttgttaaggctattgtcattcaattcagattcaatcgtttcaagtaagtctgtcattaagttttcatttgaatgatagagttgtctgtaagcttccatgaaagccccctcaatagcgagctcttctaatcctttactatgcttacaaaatttctttcctttctttatggatgtaacgcagtgccacacaactttgcgataatctgaacggcagtgccaacttcttctagataatattgaaccacaaaaaccacattctaacatgctactaaaagcatacatttttgaatagcgttcacgttttccatttacattcgcaactgtctttttatttcctgccctacgcaacctaatctcctgagctttctcaaagtcttctttagatattataggttcatgattatctttgatgtagtacttatcttcttcaccaaaattacttaaacgtctcttgcttattggatccactgtaaaagttttgcccattagaatatcgcctttatatttttcattctttatgattcctaagactgttgtatcattccaatgatctaatcctctcggcgatttgtaacctagttcatcaagttcccttgcaattacttttcctccaataccttctaagtacctttcaaagatatagcgaactattttggcttcttttttattgattgaaagttgcttggtttctacatcatagtcataccccaagcatccttgaaaccctatcaattcaccacgttgcatcttcatttttaatccctttttcacatgtgcagatgtattttctacttcttgctgtgcaacagagctaagaatggttagaagtaattctccatccatagtaagggtatcaatgttctcttcctcaaaatatactccaatttgcatatcctttaacattctgacatacttcaaagtatctaaggtgtttcttgcaaatctagcaattgcttttgttacaatataatcaatttctccatttacacaatcattgattaagcgttgaaaatcttgtctctttcctacttgagttcctgaaatcccctcatctgcatagatatcagcgagttcccaatctgaacgctgagagatataatctttataatgtctcacctgagattcatagctgttcttctgatcttcgctatcagaactaactcggcaataagcagcaaccctttttgagtctcttttggaattatcgcctcttcgacgaactaacgaatcagcttttattatttcaacattattgtttttcatactgaaattcctccttttgattctatattaccgcgttcaaatcaaaaggtcagctaatttgtgtacttaatacgcagtctatttttaattttttcatattcctttttagtcaacatatttctggaatataaaaagttaagcattgaaagttgcatactatattttactactgattgttccaaaacttaccctcctgataacatattactcttagttattctctgtgggtatgactggttatatcaatcatgggaatttcacccgctgtccttttacgatggcagcctgaacggtcagaagtatcattatcattatttgtgtcatggcagataggttaccatcctatttttgaataaatgattttcgctcatttcctggcgcattacattctattgctcaacaaataaatatagtcccacctagaattattcaattgtcaatgaacaaatcaggagggactattttatattatgtcttattcgctgaggaaagtctgtaagccctagcaaataatctgtactgacgttgtataaatttgagagctcaataagtatctctgctgtcaatgttacttcaccacgctctatttttgcatagtttgtatgagagaacgaaagaatttctgcaacatatctttgagtataatcatgatcctctcttaaatttctcaatcgtctgtacattacctactcctatgaaaagtatagtttactttctttaggatttttatatattgtcataatgtgacaacgtatatttagatataacgactgcgtttttatctaactggttctacatcaaatacaaatttctaacctttactaaaaatattactcaatgcattgtaggtataatcacaaaccgcttggtaatcatgcctacctccttgtctttcacggaaaatgacattttcttccaacctgaatactgatggggcttgcctagcaagagagaagacttgctctttaaaggcggtgtaggcaaaatcatctgtgccacttgcggcgtagatgaagaagtctttttgcttctctttaactatatttgcgaatgctttagctggtgttccaacatttccactcataggattgaaataataaaagtaatctaaggcattttcaaaggttcgccaggtattgacagaacccattgaaaaaccgctgaaggcacgaaattgacgcgaggctatcaaatccactgggctggttgatgctgcataggtactgtacttactctcaacagcaggtatcaaatcattggtcagttctcgataatagcgacttgttagctgaatggctaaaccaaaatcgctagaatcttgtggactggtattgttgtatgtgagattaacaatgatgactgggacaatttctccatttgcaatcgcgtgatccacaatgtgtttgaatgcattgggagaatgagggcttcccatagttgtgcgttcattggaccaaccaccatgactaagataaaccactggatatttttgctggtctgaatagtcataaggaagataaatgacggcttctttttcaattggaatttgggcgtttgtcgtgtaggaaaaagattcaaaagtaggatagttaaggatttctaaggtacctggtctatcgctaggtttgaaatagtgtttaggaatggttttcaaatctggaaatgtcatttgttcctcactttctattattcttgaaaaaggtaagtcagtccatgttgaatctctagttcaaatgattcttggttgtgtccgccaccgttattttcccaataaatgaggttatcacctgttatcagatcactatgattgctacggagggcttcgatctgtggaatcatgctgtattttgtcccatcacttccacctaccatcgctattatttggaaatcattctgcccgtagttattttcttgcagaccacttaccaaggtttcagcaataacttcatcgctgtttctaccagtaacttgtccaatccagctatcgcctgccatcggcatgtagtagaaaaatttatcactctgttcaaccagcacatcccatgtcgtgataccgcccatagaatagccaccgaaagctctatgagaacgacttgctgtgaaaccagtttcatcggctgtttcagcaaaagtcgtgtattgactttcaaccgtcttcatgacctctaaaacttccgtctctgcaaagtaatgatttaaaggataatcggctgaataattcgacacaacaaaacttcgatctggataataagtcggaaacacaaccagcagtggctcaatatcgccatttgcaatccagttatctagcagtggtttgacatctgccgctacttgctcagcagacatgcctgatccatgcatgagataaaggatattcattggtttgcctgtctcatacgaatcaggcacataaacaagtgcttctttgttatactccttgccatcataagtcgttgtataggtcataccgtcaattctacttccctgttccttagaaagcgagttagtgcgagaagaacatgacacattttggcttatcaactctgttgaattgttggcttcattgctttcaaagtatagataaagaatcgtccctagaacgactaatagcaagcctgttaatgaaaaaataaaagttcttttcatcgttcctcctttacatcctacatagttaagcgctcatcatgaattctatttttagaaatacctaaggtaatgagcgttttttcaacttttaagagtgtttgtgcaccaccaacaataaagaataatccctgtctcatttccttggcagatagaatttctcctaattcttccttggtaaagcgatgagcttttccgtgataactggtcaactgattgtcttgggctaaggtttcgaagtattcttgataatacatctcttgctcatttttcctgctccaaatgatatggaccgagcgtttaccactgtattcgtcggctatactttttaaaggggcaatacctgagcctagtccgtaaagaataataggccgtttcacagagctttcttcgataatgggactgaatcgaccaaaggggccttccagttcaactcgtgtacctagtggtaaattcggcactttcttcgtaaaatctcccagtccttgaatgataaatgttaagatattgccgtcttgactaggagcagaggcaacggaaaaagggtgtttctctctgctgattcttctatctttaaagcgcataaagtaaaaatcccctgcttgataatggtggtctttgggaactttgatttgtaattcttgtaccgttggtgacaagctggtgcttgcaatgagttcaccttggactagactaccaaaatccacaatatacttttgccaaacatagcaagccaaaaaataaaccgtgtaaagatcaaacaggatcataaatggcgtcaaaatggcaatacgattgatgaagtgaacatgtagccagactaagccaatcatgacaaaatgtaagcggtgaatccaaacggaaagctcgtgtttgaaaaagatttgcaaacgatttttcaagcgtttcgccacaggcatccgatcaaccaaccaacctgacatgaaaaagctggcataggaaattccaaaaacagctaaataccaagcccattcgcctgtcagacgaatttctgtatgcatggaaaataaaaattgttggtgaaaaaagattgctagaagagctaagacacccagcatcccatgaacaaagtacatagctggaagtccaatcaaacgatccaaccactgcggtcgagttgacagatagaaaatggccagccaccagacataagcgatcaagcctaaatcatataaaaagagatttaggcctgtatcaagcaaactagtgttaagcaaaatgatgagtggcatgggtagggcaatcaatagtgaagcccaagtcaaatagagtgcttttggatgttgttttaacattattttgtgactccaatttcattcaaccaagcggtgatgtcaccttctgcattctgcacagtttcatcttctccgcgaactgtaaagccgtctagaacggttgcatttgggaactgactctccaattgacgttgagtattgcccaaaccagaaccaagatgggtcgtaaatgggacaagcgtcttatctgctagttcttctgcttcagcatccaagaaggtccgcacaatcattggatactcactccaccaaacaggagctccgataaagatggtttcgtaacctgaaatatctggcaattcattggcaatagctggtcgtgcatctgcctcttgttcttcacgcgcctgatcagcggttgcctcatactcctcaggataagcaactgctgggataatttcgtactggtctgcattagttgcattggtaatgtaatccgcaatgaccttggtgtgaccaatttccagcggtccatcccaaacaccttccgttcttgaaaaataaacaaccagcacatcattatcacctgataaatcgctatcggtttgtaagctggttgatgctgtcgtcgtttgagaacttgtcgttgattgattctgacttgtcgatgttgattgccgacctcttgagaagttccatgtaaatagggcggctaaaatagctaccactccaattccaaaaatcatctgtcgtcttttcataacagtttcctctctctatttgtttaagttatcataccacgtcatcaagtctgaatcagcctgatcgaccttatttccttcgactgcaaaagcaggctcgatacgagcggtaacctgtttttcagccaagacagtttcgatataatcgatgcttgaacctaatccatagccgccatttgttgaaaatggaataatcgtttttccatcaagttctttagcataggtctcgataaaggttgcaacgggctctgccatggtcatgccccaaatgggatatccgatatagatggattgatattgagataaatttggcatctctacgtccaattcaggagtgttttcgatatttcgttcctgattggcccgttgtaccgtttcaccataatcagaactatacgtttctttggcaaccaattcaaccacatctgcacctgaaagtgcctgaatcttgctagccagtaactcagtagagcctgaccgtgaaaaatagacaatcagactatcggcgtcttcagacaaaattcgagtcggctcttgctcagaattggtatcttctccatccgagactgtcccacggctattattccactcttcatctgagagaccaacttgcggtgctgcaatctgactttggtccattatcccgcttggaagaacagatgaagatgaggttgataaactactacttgtagtattgttattttgaacggagcaagcagctaagactaggacacttaccaataaaataaagcttttcctcatagacacctcctagggattttttccaacttgataaatcaagaaatagacaaggattaaagcagctaggctaaaaccagccatccaaccaagactgatataaaaattcgatgtcatggccataatgacagataagccaatcggtcctccaatttggtgcatagcatttgtcaaaccactagccgaacctgccaagtcatcaggagcttgatagatacctgctgccgtcacaggtgcaacgaccattgcttgaccaataccaatcaccagcattggcaaggcaacagcttgcacataacccaactctaatggtgataggctagcccataaaagaccgagtgataaggaaatctcgccgacaaataaaattcgattgttcccaaaacgcttggtcagtttgggtagttgaagagcagtcaggaaggttgtgatggtcaagggaagaaaagcaaagccagattccaaggctgaaaaaccataattagcttgtaatacctgtggcaataggaaccaatagggcaacatagccatcatgaatagagctctgacaagataggcaccaaaacggaccttgtttttaaacagagctagcggcataagaggatgcgtttgccctttttcatagaaataaaaggcaagcaaaataagaaaaccagcgataacaaaggcaagggggtaaatctcaccgtctaaaccatagatcagactcactaaacctgcaactgacaataaactccccaagtaatcaattttctcttggtgtccagccttagcaactacatggcgatgagtcagatacatcaagagcaaggtcaaaggaacattgattagaaagcctgctcgccaggatacaaaactggttaggccaccaccaatcaagagaccaacacttgatccaattccagccgtcgcaccatagtaggaaatagcttttgttcgcatctcacccgtataagtatccatcattaaggcaagggttgttggcgcgataatagaacttccaattccttgaatagcacgtgccaaaatcatcatagatgcattttggacaaggccaatcaccaaggaactcagtccaaatattgctagaccaatttgaaaaattcgcttacggcccaacaaatcagacaagcgaccagataggagcaaaaagccaccgaaggtaagcgtataggcattcgatacccaagccaggctcgtatctgttagatttagactctcgccaatctgaacagagctggtaaagataatggaattatccattaagatcaaaaaataagctaatagggtaatgggtaagatgatcccaaatgaatcttttttcatagattcacactttcttagtaaaaaactggtttcgctagagcttcacttcctggctccacgattccaacgctcacacccaagtcacgacttggatcttgcaataagtccatgacatattgggcaactgcttggcgcgtgacttgcgctcctttataaggttccccctgcgtaatcaatttataggcacgattgccttcctgattatagagccaagtcatacgaaggtaggtataatccaaacctgactcatccactaacttagcaccgatgacccgattatttgttggagaataagcaccaatcatggcttcattccatcgaccaaagtctcctacgacctcatcatagacaccgagaacccctgctacaatgaggcgtctgatacccttttccttcatgacggcaatggttggctctaacaaggctggcgatgcttcattgacaaagacaacatctgcatcctctaaagcctgtcggacattatcaagacgggacatatccccatccacatagcgaatgcggtcatcctgataagacaaacgttgactgacctttcgtcccgctagtgtcaatttaaaatcggtttcttctaatacccgtgggataagaaatcccggaatttgtcctgctgcaccaataattgttaatctcatattttttctccattttctattgtttgacttgtttttcccagaaggaaatggcgtcatcaacccacccctctgctaccgtttcttttccaataccaaagccatgcctcaaacctttatagacttgaaaccggctgtcaattccgattcttttcaagttcttcagtcgattttccatcacctgccagttagcaatccaatcgttagtgccacaattagcataggtcggtgcatcatctctagaaacagatgagtaacctgtatattgactaacaaccatgctggctggctctatggatgtccttgttaaacgttgtaattcacttttgttacctaagcgaatagccatcctagctccagcagaaccaccccaaagcgaatactggtcagggactatcttcaattcactggagtgactataaagataatctagggcctgtactagatcttcataggccttcttggggcgatagatcagagcaaaggcattgtagcctctttggcttaaggccaaggcttgtgggaaactgtcatgtaaggcagcaacataatgaaaaccgccgcctgcattgataagggcaaatttctcatattccttccctttgaagtaaaatagccctgtttctctcttacttggatccttcaccatctcgtcctcatcataaatggggaaaaagatttgttcatttttttgagcacgctcgagtaagttgttcaaaacctctaaactggtctttgttttcaggtttgaataccagataaaatgatttgaattagtcacatcttggacagtctcctcaggatgaaaggccagctgaagcgggaataataagtgtccaaatcctctaaaactaggatgttgggtaatttctctaatttttgtatcttttgtaaataccataattcctcctttagacaggagtcttcttactccctaaacacaggttcaacccttttacaacggctaaatttttatggtcaataatctcactgtaaccaatgtccagctgtttgatttggtctaagtcttcttggtccaattcaaaatcccaaagggctacattttcttccaaatgtacgggatttgttgatttggggatgacgctattgctcatctgcacactccactttaaagcgatttgagcaatggatttctgatgttttttcgcgatattttctaatactggatgctgaaagatatttttcatcccttcacaaagcgggccccaagcctgaacctgaatcccgtaatccttcatcagtttccttagggatgattgatgaaagaaaggatgaagctcgatttgatttactgctggaacaatttttgtatttaaaataaaatcaagcaagcgatcttcagagaaattcgatacgccaatagccttaattttcccttgagtataaagctcctctaaggcacgccaagatccataaacatcccccatcggttgatgaatcaaatacaggtcaatgtaatctgttcccaagcgatttaggcttgtttcaaactccttcatcgttgcctcatagccatcagaatgaatccagaccttgctggaaataaaaaaattctctcgagcaattcctgaatccttaatggcctgccctaaatctgcttcattaccatagatactagccgtatcaaataagcgatacccagcctcaatcgcctgtttgatgtaggtttgagtctcatcacctttcagttgaaacagccccatcccaacctgtggcatttctattccattatttaatctaatcttattcatacagccacctccacttgatgtctctattttacaagtgctttaaaaaatagtacaatagcaattagttagactgctatttataaagtgaatagtcacaaaggagaagatatgatcaatttacagcacctagaacaattgattacggtcgctaaagaagggacactatcacgcgcagctgaggttttgttgatttcacagccgtctttgacccgtaatatgcgtcagttagaagacgacttaggcgtccagcttttccaacgaagcaaaaacaaactttccttaacggaaactggtaaatatactgttcaacaagcagaagctttgctcaaccatgagcagcaatttttgaaaaatatccaacgtttttctctccaagccacgactttatttggcggcatctcagctcctggtgtagaatgggaagtgaggaatcgtttggcagagcaggacttagaacaagaagtccatgtcgagttacacgataatgactccctactagaagccctacttagtcagaaattccagtttatcgtgacagactttccaattgagcatgacgatgtgctgacaactggattcttcaaagaacaactttatatttccgttccacctgcccatccctatgccatgcgtgaggaaattgcattggaagatttggcaaacctaaccatgctcttgcggtccgatttggggatttggcaaccacttgtggatcagctaacacaaaccaaatttattgtccagacagattgggaagcctttgacgaactgatctctgcttctgctttgccaagcttttcaaccaatatcacccagaccgcctctgataatccaacccaacgtgtgcatgtcccaatcgtagataaggaagccacaaaaaccttttacatctcaactttgaaaaagaataaaagtgtactactgcaactcacttgataatacaaaaaagtatggttcgattgaaaaccatacttttctttatcttatgaatattactgacgaatcgctcttggtaggacaataacgactgctgtaaaaagaacggcccacatcattgctgatgggaatactgttaaggtcaagaccagacctactagttttatcacaatatcaactattccagctctatctagaatattaaaatgccctgactttacagtctctggatttaaatgttgcatctcacgatacatccagacattgctggctgttacaagtagaactatcaaaccgtacaaggtctgggctactgggttattaaaatcagcagaaacaagggctgttgtataagggaaaaaggaggagaaaaaaagtagaacaatcgaactccaaaccaaattggtgttgattttatcaatcacatcccaactacgatgcaggttaacccacatggttcccaaccagaagaaagaaatggtgtaggcgaaaaaattggtccgcaaatcccatagatcctgccagctaatttgttctggacgctcaagctctaagaccaaaatagtcatgatgatagccaaaacagcatctgtaaaagcaactaaacgttcttttgacattaaatacatactgatttctcctttaatagttaacattatatcaaaaatctaagaagaaaacatgtggtattacaatagatttaatcaaccacttacatttaatatcctatctcagtaagccattcagctacttctgagcttgtagctgatgaactaaaccgttgcccttcttcccagttgcctgttcctgccatctctgctagtaaatttccactttcccctaaatcagagctagtagatgtcgcaaatggaatgactatttttcctgaaaagtcattttcttcaatgaaatcattgatgggctaggaagcttctcgccaccagatacgatagccgaaaaagaccgtatcatactcctctcaattgtccacgcttgtggtttcatggggagtatcacgttacgattcattgaggtattcctgaacaacacgactactttcttctgtccaattcaaatcagcctcgctatatggattctgtggtttgatttcaaatagatttccacctgtttcaaaagcgatatcttgggcaatcgtggctgtatttccagaggcggaaaaataagcaacaagaattttttgactatcatctgccgaactggcttcttgactggattccgccgtttgactgctagctgtctcacttgtttgcgtactctgcttaccactgctacttgcaacaaggacaaaaactgtcaaaaatcctagaaaaataaacttagtttcttcatgaacctctcccttccttacctagttatcatacccttgtagttcattccatacaagccggcataacggctcatggtgtagtttcccatatcaagaacttcctgcgtcggagctgagccttgaaagatgaaatacaacacttttccgatgagctgatcttcgacacgattatactgtcgatccaggaaattccgtaccaaaccattgatgctatgccaatagactggtgagccaatcacaattgtatctgcttcaaatagctttgctagcacctcttcaaattgatcatctgagaaatcttgtccgtaatcataaattttataatcagctagatgaagcgtttcaaaagattgatctcctaataattttttggctaaagcgacggtattgccatttttattgggactaccgtttataaataatgttgtcatcccactttctccttatttaccgcactttatacctattaaaatgattttccaacaaatccagcaataatttcgacagcttttgctgaatgatgatcttcaaaaagtgttgtatttgtattcagactagaaattttttccatgtcttcagctgataattcaaagtcaaaaatatcaaagttttcttgaatgcgagttggtgtaacggacttagccaatgaaactaggcctaattgcaaatgccagcgcaacataacttgagaagtcgttttctcatattttctagcaatttcaactaagactggatttgagaagacatcgaattgaccagcagccaaagctccccaactttccgcaacgacacctttttctgccatataggcacgttcttcattccgttggttaaagacatggagttcgatttggttaactgctggagttacctcgttaaaggcggcaaggttggctaattggtctgatttgaaatttgatacaccaatagcacgaatcttaccttctttgtagagttcctccatagcacgccaagctccaaaaatatctccaaatggttggtgaatgagataaaggtctacataatccatgtccaatcgctccaaggatgcggcaaattcctctttggctccctcataagagaaatctgaaacccagagcttagtagtgatgaaaaattcctcgcgcggtaggcctgaagctttgatagctttgccaacagcgacctcattgccgtagatttgggcggtatcaaaatgacggtagcctactcgaatcgcttcttcaacaactgcttggcattgctccaaatcaggaatttggaaaactccaaagccaaccattggcattttgattccgttattaagtattgtgtattgcattgtttacctcgtttttatctattttcattattcaaatggatagttaggattaaatatttttttcaaagaaaggtatgattgcctcaaaggcgacatctataaaaggatggaggtcgtacatgtcaaagtggcttgcttcagggacaactacccattcttttacatcactcttggctgcatcaaagatttcacgagatgctggttggctccaggcattttcagcagtaacaaccaagtacggtttggtcatatctttcatgatattggtcacattgtaattgatcagctctaattgactccaagccacaacttgattactccaacgagaacggtttccacgagcagaatagtaatattgtgcctcctcttcaaaggcacgaggttggaaattaagtgtaattaggtcacctgttccgttttcataagcttctttagctatccttacttcctcttctggcaagaagaatgatgtcattggcgaagttgaaatatcagaaatagctggcacgactgcggtaatagcttttaaacggctatctttgacaccagcaacagacatataagaacctgacccacacatgcctaaaccaccaatacggctattatcaacgtaaggaaggctctcaaggaagtcaatagccccttcgatatctgattgtttgacatcaggaagctcttgctggcgtgggaaaccttgactttcgccaaaataagcgccatcaaataccaaggtaacgtaacccgcttctgtaagtgcatcggcataaacggcttgagcttgttcttttacggaaagcattggacctgttacaacaattgccgggtaattggtattcaaatcgaagtttgcaggcaagcgaaggatacctgcgaggcggaggtttaattctttgttcaaaaaaacaacattttgtgtttgcattatcagttctctctttctttaatggggtagttgcttagtaaaagctaggtttggtaaaagcagttcctgcttcacctaatcccaaactttcacgatggtaatcttctttacctgttagcaaatcaaccacaaattgcgctaccgattgtcttgatacttgagcggaagtaaagggttcaccttttcgagttatttctaaaggaactaaccctttattataaagccaagtaatacgaagaataacataatccaagctacttgcttctatcctatcagcaaagtctcggacaggtgaggtccacatgataccagtgttttgccgataccatttttgaaaaggaccagtaatctcttgataaatatcaggaacacttacagcgatcagtcgttttacaccagactctataatagaatctagtgcagtttgtaagacctcagggcctgaaacgtaattaagatagaccgcatctactccctctaaagctttcaataattgttctttatcatcaaacttaccatctatgagttgaactcgttcagatgttaaatttgcaagtcgttcatgagccttcctagcatatagcactaaatcaaagtcagtctggtcaagtaaataatttgtaaccatacttgcgatttgaccggcggctcctaaaattaacacttttgtcatcacactacctcagcagtctttaatcatgggcatgaatatcataagccgttaatagatattctcctacacctggtgcatctggatcatgagatcctttccccttatcgagtgcgcgaagagcaaccaattcctcatcggtaaattcaaaatcaaaaatatctttattagaattcatacggatttttttggttgactttggcaagacaacgatgccctcttggtttgcaaagcgtaaaatgatttgacctacgtctttgccatacttacttgcaagttttgtgatcacaggctcttcgaataattctttattaccttgtccaagcggtgcccatgcttcaatagtaacattatctttagcaagcaggttccgtaattctttttgttggaagtatgggttgaactcaacttggttgacagctgggatagtcgcaaaatttggaataaattgtttccaaaagtttggtgtgaagtttgaaacaccgatggatttaattttaccagcagctttggcttcttcaagagctttccaagcctgctccacttccccgtaaggttgatgaagtagatagaggtcaagatagtcaagtcccattttctctagagtcgcatcaatcgttgacttagcagtctcataggcaaaatcctgaatccagagtttactggttacaaagatttcttcacgtggaatacctgaatccttgatagcctgcccaacttctttctcattgaaataggcttgagccgtatcgatatgacggtagccaacttccaaagcttctttcactgctgtataagttgaaccatccgctggaatttggaatactccaaagccaattgcaggaatcttgtttccatcgtttaatgtgatttgttgtgtcatatgttttttcctctttcttatttatgaatctattttatttttaaaagagtgaatagtacaatacttattgtttattgcagtattcattttacaaatactgatagactattcatctgagtcagcttttttagttcgttttgtcaaaaaacgttgggagcatattgtacagatattcttggacagcaagaaggtcatgacttgaacctgtactaatatgaagtgtcagattatcttgagaaaatgactgtcgagtccacatttcttccacctgtgtcacgattaaatcctgagcgaagtcttcggtaccagttgctgcgtaaatctgataatcatctgattggtattgaccgtctgtcaccacttgttcgaatagatcaaccgtggctagactattgtctcgtccaccataaacctcaacttcccaactatcaccactcattggtccaaagtattttattaagtctaaattgtgcaggaattgtgaccaggtcgtcacagagcctcccgaaaaccctgcaaaagctcgatgattacgactagcttgtaagtcagataaatcaccactccttgcataggtatggtaacgctcttcaatataaggggctaaaccattccgaaaatcatgatagaaattccgaatttctgcttccgaacgactgaaatcttgaggggcattttctgcatcaaaggtcggtgtcaccacaatcaaaggctctatatcaccattttcaatcatatggtctaaaatatttttcaaatcagaatattggaaaaaatctccagcagtcatcctccaaccatgcatcagatacagaatattgtaagaagtcgtttcatcttctgtttcgtatcctggaggaagataaacgtaggctacttttttaatatcttggttagcatctgcataatctttgctattataagtaacctcttcaattgttccgccattttctacctcctccaaataggacggaggcacatcttgcgtttcttgcattcgattacttgaattattagtcgttgtctgcactatatcttgtctcatttgtaaataaatccaactacctaccgctataataaggaataatagactaaggacaactactagttttttatgtttcatatccatttctacatttcttagcttgccccctgtccaccatcaacaccgtaaatagcacctgtcacaaatgaggcttgttcagaacctagaaagactgccaaatttgcaacctcttcaggacgaccaaatcggtgcatagggatcaattgagaaatcgcctgttcatgtgccttggcttcttcatctgataaatcggttaaattccaaatatctgtgctaatggcacctggtgcaatagcattgacgcggacaccatcatttgccaactccatggcccagacacgtgtaaagttttcgacagctgccttggcaccaagatacatagacatatttggaccacggtgctgagcgccaaccgttgataggttaatgatattcccttttgattgaagaataaatggcaaggtttgaatagtgacatccaataaagcacgcacatcaagagcaaaggcacgatcataatctgcaattgtcaattctttaagtggtgtaacaggtgcccaaccagcattattaactaaaatatccaactgaccattaaagtctgattgaatcgcttcagcgatttttgtcacatctgctgaattcgtaatatctgctactacataactaattgtttcattgacctcagaaacttctctcagaacttcttcacgacgtccagcgataatcactttagctccttctttagcgtagctttcagcaatcgcacgaccgattcctgatccacctcctgtaaccaaggcaactttgtttttaaataattgagtcatatttgttctctctttctttttgatggtataagtatattcctaatattacgatttggaaaataccaaaattctatgctagtattcaaaaatgaatagtcaaatttcaaattaagtcatcaaaaaagtcagttgacccttgtctaactgactctgagaatataaagttattaacttagtgctaagtaatcctcttctgacacaggctccaaccactctgttttggtattgtcccccggaacttctaaggcaatatgtgaaaaccaggagtcacctttggcaccgtgccaatgtttgacattggctggaataacaatcacctttccaggctcaagactgactgcttcctttccctcttcctgataccaaccttggccagcagtacaaatcaagatttgcccaccacccttatctgctcggtgaatatgccaatgattgcgacaagcaggctcaaaggtgacattggccagaaagagcggcgactggtcatcaacaagcggattgagaaaagactttccatcaaaatactgtgcaaaggacacattttcctgcccttgtccgaagatattttctacatcaaaccttactttatctgacattttttatttctccttttctgtccaaatgtcttttgccagacgaaagactgcccaagcctttggccagcccgcataaaatgcgacgtgggtgataacagccacaatctcttcttttgtgacaccattatttttggcattttgaagatgatgctctagtgaactgtctgtaattccctgagccatcaaggccacaactgtaatcatactacgtgtctttaaatcaatagctgggttattccagttttctccaaacagaatatcatcattaaaatgagcaaattctggcgcaaagtcccctagaatatcacgcccagcagtctgtttaatagtcattattctatttctttcatatcagaaatcatacaaagtgaaaaggatgaaaaatagcatcttccttcccttttcatccttattatttaatcattgattttgtaggctaccataagacgtttacccaagccaggtgtttcggggtcatgactaccttttcctgtatcaagtgtccgtagcaatgcccctatctcgcacagccttgcccacatctgactcattcatgtatgctgctgtgtcaatatgacggtagccagcctttaaagcctcagcaaccgcctggtaagtcggaccatcatttggaacttgaaagacaccaaatccaacagtgggataatgtggccatcatttaatacaattgttttcatctttagtttcctccattttttctctgttcaatcaaacgcaagaacatgtcaactgtagaagcatcttggtgattgaaaaacagactttcttttgtatcaagttctgcaatggctgccatatcttcatctgataagctaaaatcaaaaacatcaatattctcagccatacgctctggttttactgattttgtcaagcagatgataccacgctccacctgccaacgaaccataatttgagctgtggacttaccatatttttccgcaatcgccactagtgtcggatgagaaaagataccatttctaccttctgcaaaagtagcccatgactccatctgaacattgtttttgatcatattctcttgtgcgaaaatctgttgattaaacggatgggtttcaacttgattgacctgtggtgtgatttcattaaaagccaccagatcactcagacgatcgggatagaaattgctgacaccaatggcacgcagtttcccttctttatacaagtcctccaaggcacgataagaaccatagtaatctgaaaagggctgatgaaggagcatcaagtctagataatctaagcccatgacctccaatgaatgtagaacagcttttctcgttttctcataaccgtaatgctctagccaaactttgctagtaatgaaaaattcttcccttggcaaacctgattctgcgatagcttcaccaacttctttttcattggcataagactgagccgtatcaaaatgacgataaccaaccttaatagcatcaagtacggcctgcttggttgcactggcaggaatttggaaaacaccaaagccaagaattggcatcttcactccattgttcaaactaacgtgtttcataggattcatctcactttctaaccttattatagtcctattttgtttagctgtacaatagcaaagaaaaatagcagtattcattttttaaatactgctatctatactaaacccaatcctccttcaattgccttggaatcacaagaactaccagagtcaaaagaacggaaagaagcatggctggcggaaaaatagtagctgacaagacaagaccgacgactttcccaacagtatcaaagaatatccatttcttcatgtcttcaattcgttgttttaagagaagattgtttggatcatcttgataaagtgaacgataaagccctctgtttgaaacggtaatgaataagacaaccaagccatagacaacttgtgctaatgaatcggtaaaattagttgaaacaatagccgtcacataggggaataacgaggaggcaaagagaagaatcatcacccaccagacagttttactagaaattttttgaacatagagccattcattatgaataatgatcagcatactgcctaaccagaaaaatgaaatagtgtaggcaaagaaattatttcgtagtgcccaaaatccctctaccgttagtgattctggtcgttccaactccaaaactaaaattgtcataatgatagccaatacagcatctacaaatgcggatattctttctttattcatttctttatcttctcccctttctataaaaaagtgaagcaatagcacctatcacttcaccaatcatagtttactctacgttttctttcaaccaatcttcaatatgagctgcaatctcatcgctgttcctatcttggaacatgaagtgagtatttccttcaataccttctttaggtaagtcaacgacgcttgcattgccaccttctttctcaatagcatccgcaaagtcataggctgtttgacgcattgcttgccacatacctgttgcttgaatgtctgcatcaccattatcaatgtagtcaccataatagaaggttacagggatatttttctcaacaatagctttgaactcatcgctatctgtacttggtgctccacctggttcaatggcaacaatagcaccaatattatctgtataacgagcagctgtccatcctgctgctccaccttgtgagtgagtcactacaattgcttttttacctgttctttcatagacctcatcaatggtttctgccaaagcacgagaaaccacttcattatcataatctgctcccatgtctgactgcatacctgtatctggtgtcatttggcggaagaattgattcaaagattcctcatcatttgggaattgtgaattatcgtacacttcagattgaccattttcccaacgaccaatacggaattgggtataccaacgttgatcaagcgtttttgtggagatatttcctgcaacagaggtttgacctgcttcaccacgacgtggttggtcaacgagataaacactatgtccttcttttaagaaataatctgaccaaccatcacgaccgtctggagttgtttgccaacccatacgagattgaccatacccgtgtaggaaaatcattggtgcctctgtttcatcctctggaacttgatagagaacgttggcatggtcaacgtgagaagtctgaccggcaccggtttcctcccattgattagctgggtcaaaagttccttcagaagttgtcacagtcccaccagctgagaaaattccttgatccgcgatgcgaagtacagtactatcagtattcgctgagcttgtagtcgaattgctggtcgaatttgctgagcaagcagctagcaaaatggttgcaatcgctgttgttgtaaataattttatttttcttgagttcatttctatacctctaaatcttttttcttgtcctttggacatgatttagtttaaacgataaaaactcgtgggtaaaatagtgatttttgataatagtattcagaacgtgaatactacattaaatttagttcttctccatcaactatatctattctgttcctgagaatattaaaaatattttcaagccccctcaccgcattttcgtattcttcgattttattgtctagctgattctgtatcatttcaatctcagattcaatctgtccaattgtaacattctgcgataaattcatcttggaacattcatacttagctaattgcttggaatcttgattctcactttgtaggttaacaactacttctgccatcttgtttaaggtggcggttttttcttgaagatttgtcaattcaatatctaactgtgcgatttctccaaccaattcatcttttaattcaagaaaggatttgttttgagtgttcagtgtcatcaataaattgatttcttcaattttttgttgaaggctgaccagacttattcgtctcttataaggtaaagacttattgtcaaacgttagttggcgaatcaagtcccttcctttcatatatcgattcttttctgagtcctctttatgataaatgaaataagaagatgtttctcgaataaacacctgatactgtttcttattttcttgttctaagatatttagttgatgatttggaatgaaaattagtccttcttgtccaatacccatccaaactttaacaaatagaccatctggcacaattttttcaatttgttcctccgtaatctcaacttcaaactcatgtacagcatctctcttagttttatacgtttcataagcttcggttatttcttcgacagtcaatacgtcgtctgaatactgttgcatctcaaatttttcaaattccatttttacgtcactattttgaagcacttcaaccatatcatgttccttgaagtagccctcaaaataggttgtgtcataaagatatttcttacttaatgacttatttggtatggaaatgcagctttttccatcagaaagaacaaaatctattgtttttattttgctcttcaattctaatcccagtaaccgagctttctcaactaaatcatcaaatgagttggatcttggcaacaaaaattctaaaatctgttcaatctttttcttggcaaaataatgttgaaaaaattcatttgaatagggttctctcttattcagcttatctcctcggatgacttgcttcatatctctatctgtcatgaaaaatcgactatgtttcctagagaaatcaattttgacatttagttgctcagcttttcgcataaaatcgttgaaatcaattgaatgttccattaaaaagaataatcgttgcttcagttcgtatttatgattagaacagcggtaaacttcataatccctatgagaatatcttttgggtggaatgattttggccccagctactttagaaatcctatccgaaatcatttgtaaatttctttcaaaagcgtagtcccacttcaactttttttgagattgattattgatagagttgataataatatgattatgacaatggttctgatcaacatgagtggctacaatgaatttatattgtccacctgtcaactcttttattgtttcatagccaatacgattgatttcctcaggacttaatttatcctcaggtgagaaagactgaataatatgatgagcatttattttccgttgctttttctcttgtctatcaaaccgtgaatcgtatagttggtcatttgataggaaattattttgatacatctttaccagctctatatagtcaggaaaatcaagataattactcatcccaaaatctgaaatcaacgataaattcctggttttcttaggatcaagaatatacttaatcaattgtcgtcggtattttttcccatgaacagcataatgcttagtgatgaccataaaattctctcaatcgctgacactttatgtcaaaatctagttgtaactgtttttctaactctgcaataccgagttgcaattcttttacttgttgaagacttaataggtggctttgatttaccgaacgtgcaatctggtttatattatttcctatcctacgaatttcaaaaatcaggtcttgaaaacctcttgtatcgattgtgataaaattcataccaggattgagtaaggtttttctggcataatgcgaaaagtttggacactgactctgagcaagatttttgttgaggataattaattcttgatcactcaaatacacctttttcaaattagttcgataacgattttccataataacttaccccatgtacttgtctttaaatgaatggcttaatggaatagttatctcaatttccttcatcaagtctttgacacaagtcaagatgatttcaaggtgttccatagtaactgattgagacaactttgccagaacaagtagctcatgtagatctcgataaatctgttctactttttggtgttgccaatattttatccaatcttcaagttgctgggatgattgacagttttgttcaagtaacttacctctagcaaaaggagagaactgctcatatccctcttgaaccatcaaattttgtatctgttgatactctttttccgaaaaatttacttccttacgaatctctctaactaagttttccatccagcattctcctaattctttattatcggtatatccccgccctcgtattggacacggcactgcataatatcttcctttcaggtctttgcgagctcagatattgtgtccacaatatcccaaaaatcttatcgccagccgaccaaaacctttgagttttgatagccgacgataagataacttggtggcttcgcccccaaacccccagtgaaaaatcatggattgatttttttaggaatgatattaggataatagaggtgatttggaaaaggtatcacaaaacaaaaagtaggatatttctaacctacttttcatttccttatattattcagaaagagctgtctcatatatggacatcttatgtttaaatgagtctcttccaccttccaattgattgataatatggttttttataaatttttcactaacatatccctgtgattcaatccaagcatgagccccatctgattccataattaccacttgatcggtcatggaatttgttacaattgtcgcattatgggttgctaaaataatttgtcgttgagctttcacgtctctaaactgttgaactaaatgtctgtatatatagcggttatccaaattatcttcaggttgatcaataattaatggtctgaaatcctttgaataatcactatatgctagtaaaaaatctaacatcgctacaactttttgacccaaacttaatacactaacttctttataaagaatgtcaagatgttgtgatgtttcttttgagttaatgttaaactccaaaaaaagtctttcattggctacgtgttcttttagcactctctttaactcatctagtaaactactatttgcgattaaagaataaatactagtttttaaatagggtatgttagaatcattaatctcggaattatttctccacttattctcatgttttgcaaaattctcctcagaaatattttttaataatataaaatacctattaggaatattttgtttcaaaataacgttaacaaatccttttattcctaactcctgataaacaaggtatagaatatctgcaacatcccgcttactaattctataattttcaaatgagaaattgagagttgaattacttttgaaaagagtgctttcaaaatctggtacttcccatctatcaatttgctcataacagattcttaacttaccaacttgagtttgattgaaatcatcaattattttgagtattgaatccttacgaactctcctatatttatcaagttcctgtagtttagcttcgaatgattctagagtctgagttcttaaaccatagtttggtctcggtaaatttttattttttagcattaagtcggaaataaattctgtaattttttctccatccgctgttctaaccaactcattaacagaatatctcctatcaaacattttttctaatattctagttttatcaactaatttgaaaaattttccctcaactttgtatactttcgtatattgagagcgtgtccactctttgatagagtcagaattgtagttataaggatatccatacctattctcacgattttgcccataatattgtaagatattgtccttattttcctgcaagacatctggcaaactaacctcaatgatatattcagcatcctctaaaacatagagtacaaaagcatttgcatggttacataggaattctaatttactctgcttgtcgcaatcctgagaaagtacaaattgtaacatatctattagtgtacttttccctgtacctctccctccaattaaacagttcatagatggtgagaatgttaaaaagaagtctctatctttttctaacttatcacctgtaagaaaacttctatcgcctccacgactttgaatgtataaaccttttatgtaagacttttgttcaaaatttggttcaaataaacttactgatacagtgtaatcaagcaaagcttcttggaacattttaaaagaaatctttccaccttttatccacatattattctttccgactgaatcaatatcatgtgaatcattatctaataaaaaatttggttcacaattaaaatctgtcaataaacgatttttcgatccttcaacagaatttatattttttacaccaataaatcgtgtattttcttttgtaaaaacttgtctcttatatgcacccgacaagtgagaaccttttttcaaaatattataactattgaaatgagcaatgtagttaattatgttttgattattaaaatctttcatgatagtcaacgaatgctgataacttccatctttttcacttataatattttcacataaccattgattaacccaagattctttttcatgatcgtatatacaaacaatatgtaacttatctgctgcactaatttctactccatgtaaaatatgaggatgtatattataagtcggataggttctcgttataattgaaactgctgtttgaagttttttaatacctttggtagtattatgatcagttactacaactatttctatttcattttttaagatagcttctgctaacaaaagaaaactaatgtactcttttgggctagaaaagacaactttatcaaagctactaaaaaattttgttttatcaactttgattttcttatttttgaaaaatatatcaaataattcatcttctgtactttttctatatttcgttgaagtccagctcgaaaatagcttataatcataagaaacaggtgtatgtaaatgaatcaaggtcttatgaaaactaccgaatttctctttggtatttgttaattctcgataaacagattttatcttattattaaatcctcgcaattctaacccccaaaaaatattatctttaaaatcaattatttatttttctcaagtaattcattaagtaggagttcactctccttcaccatctcctcctctaccttgctccattttccaaagagacactcttgtaacacttctgctgcggagccttcatcaattgcagaatcataaatgcaagtcctgtctctttgataaatctgaatctggtcaaagagttgctctctttctaactcccttaggttatcaaccaagttctctacaatcccatcatggtgttcttttggcgttgctctggcctgattgggatcgatggcataaagctcttcgtaacgaatcaaagtactgagataggacaattctggtttggtgccaatcacagctaaggaaacctggtagccttttgatactaataattgagcagtctgacgaggaacttgagtggttcgcaaagttccctcaatcagcaagtgatacccctgcgtgctgagtccgtcaaccagatgctctaccatttttcctgcaaatcccttggtatagtccacgctgtccttgccatacttttcttgcagggctaagtagttgggatgctgagaacggtagctatcaccatcgatgataatgatattgccttgaaattctttttgcttgatacgatgaatagtcgtcttacctgctccgctttgtccaccaagcaagatagctttcggttgacctggaatcgtctttcctcgggttaaggcccgaatggttcgctgtaaggccttctgaaactcagcctcactgaattcttccaacctcattaagccaccacccgatgatgcaccatgtctaacatccgctcgataccgtctaaatagccattgtaacgctctatttcatcgaaagtatcgacaaggtaaatttttgtgttaatcaattcggccaagtcatcactcatcaaaatccaagggttggattcatcatcaaaagcaatatcttgactatcctggtatctataaagctgtgataaaatggcagctccacgttcttttatcacttctacttttaaagtcagttggtaatcttcaacaggtgttaacatcttatcctcccctacaatatcgacataagaaacgttaaatttctgacaaatacggtcgatgagttcagttgaaactgtactagtcccattttcataacgacttaagctattgcgtgaaataccaaccattttcgcaaattctggttgtgttaaatcatgtgttcggcgtagtgacttgatattgtctccaatcatagataaagacctcctcatatttgctttcattataccataaaaaacggataacgcaccatatttggtgcgttatccgtttttaggtttcttcgattgcttaaactgctctattcgcttccccaactgctcagtattcagtttatttttcgcttcttggatcgatttatcaagactttgttcctcatcggttataacgctttgagataattcaacgtttctatcaggcttaaaatttgtatcaaaaaccacatctaggagttgttctactttggttagttcagtatctgacatctcagatagtcgatgaatcagtcgtttaaattgatcctggttctgttttttcttttgaaaaaatttcattatcttctccttcaattataaaaaggtagcccgcataggactacctgacttataaatcatcaatggctactgaaatagcctgcaactttttattttggattttcttttcatcaatcaattgatgaagttcttcaatttgcttttgacaggctgaaatatccttgttgttttgtgcaatagtgtctgccaagtgttgtttatagtcgcttgtgatatttactttcttcggctggctttgtttaacttttgattcgggcgtctgtacatctttagattctgactccttttgttgctgttcaaaagcagccacatagtctacttcttcaattggtttttcatcttgtttatggaaaagtgctgcaatttttgctcgttcttcatgggatgatgttggtttcacatcatctagtggctgatcaaaattccatgttttactcattctgtatcctcatttctgtaatttgggtgtagtgtggtttctttaccaaaggcttgctctagtgcttcatgaaatgacaactgactagattgttgccgtttgataaaggtactgtacatagctgtttgtagttggtcacgatagtgttccaatttctccgtctcacgtgagaccttttcttcttgtctagctactttttcagccagacgttcaatcacactcatagggtgtcctccttgtcacattctagattatgatagcggacttgattttgttatcacaattcaaaagtgtgctctcgtttaggtggaggatgatctctaatgacttttgtttgggctgactggataagatctcttaaagataattccttttgtcgtttcacaatatcattccaatctaactttgtttcaagtccttgcaatggtggtaaatcttgagaaagcggaagtcctttatctgacagtttctgacaaaattctcttcctgcctcatcgttatcaacagccaatgttaatgcatttgaatgagtttggaagaaggttgtcgtctcttgtattgcctgaagataatgactaagtctgcttggatttactgtatctagaaatgccaatttcccctgttcctctgctgctagacgcaaggtctgataagcaatcacagaaagttttaaaccttccattgaaatcaggcgaacatcggataattgcttttggtaaagctgataataactcatcatatcgataactgattcacaaaaaatgagtcgcttaggattcccaatatcgaaactaataccgacatagccatgagatcctttcatgatttttttgagataacctcgatcgtgtttttcttcatttttgacgagaccttgaaggcttgcggcctgtaaggtcccgttgtggtcatagctttttaacactaatacgggctccgattgataagtagcttgagcaagcaatccttgtctaccaaaggtattgatagtctgatcacttaggccacggatgtcttttaagtaaatacgtgcttgctgaaagggttcttcatgcaaataatattgaaacggttgataagtttcttctatcaacttagcttgttcaaaatccccagtttcaagataggatacagcctctttgaaagtaacgcctgccactaattgaacaaagtctatcacatccccttgtatatctcttgaaaaccatttgaaagtattggtatccgcaaaaatccgaaaggaatcatggtctgggtgttcataaatgtgtcctgataaacgtctgaaggaataacccagactttcagccacatttaaaatggccttttgttttactgctttaattcgtgtcatcttgtctccctataaaaaaagcagaagaatgcctcctgctagttgttctcacttgttgttgttccttggatcgttggtatgctggaattggctccatctgttgcttctttcatgtcctccagtttcccattccaaatggtcaactgattaaccaggagcttgtcggaaactttggagtaggataacataaccgtcttggtttctgtctgagtagttcgctgttgttgctcactcaaatcagaaacataggtcacttgataggaaacttccgcaagtgcaacattgctttctgtattgacaaatatactggctgattcaaatcggtagtcaagcatataatctttataaacttgattaatcgctttattctgatttgtttcctcttctgaaaatgccgagtccgtcatgtagggcttgatacgagtgttattttctcctagttggaccttggtgaaatattgtgtgagaaattctttgacaagctcatctgataggactgtcgctctttcctcctgcttttcctttgtcacaagtttattggcttctgctcgtatttggtgctcagtttgttttgaaacggattgtgagccaatcgtatagccaatcatgaccataaaactgactgcgattaaacctcctactccaatcagaaatcgagctttcactttatttaacatggcttactcctttattagtgatagccaaatcataacaagattatcttggaaaatttatcacaagaaaaaggactaccaatcggtaatcctccgtgttaaactattctatttctccaccactttataataaagcttaaaacgagaaatagattcaaagcaataaaaaatcctgtaaaactccaaactccattagttgctaaatcttctgaatagaggtatctctcagtaaagaagaggtaaactccatagatttcaataaagactaatccactgatgagtccgataagaaataaagcacctgaaactttcacaatccgataaaggacaaacaacatcagtcctattgctgcgataatcaaaaggctttgtagaatttgctccaacatcttacacctctttctaggctaattgcttgcgatagtagtcagcctgtctcttgtctaaatcatcaagttgggcaaccaaatcaaggtattctgccttcgtcaccttatctaagcttggaaaatcattctcacgacttgtgatgatgatttccagctgtccagtgatttcacgctttgaaaagctataatcaagagtttcatcttcatactgttcctttaaagtttggtagtttgccctatcttctggacttgtatagccttgtgtcaaccattcttctagttgataacgtatttcttctagtgtttgagccatgatctattctccttatgtgatttcttgacttcattttaccgcgttcaaaattatttgtcagccttttttcttatatctcgagtgctagttgttgcttcttttgggctgttgtatcttcactaaacttggccaaagctgcatctatctcttcaatctctgcttctttttcaaccaagggagccaagacatcatacttagcctttacaagctgatattcctcttccttgggaaagattttctcaacttcaactttggctacttgtagcttatcttttaaatcctttaccagctcttgcgtcttttcttggtcatccaaaatatggtcaatggcattactaattcgttgaatggttcccacgtctgatttcaaatcaagggcgacagtatactggttatcacctacaatcgttaaagtaacggtctctggtaaaggctcactaggaccacgtgttgtcattttcaaatcaaatcctctaaagctggcaagtgttttgacttccttggtctctgagcggttataggtgatgagtttacgcagatagtccccagcttcagcacgattatccattgcttgattgtcaaattgcatgacaaaatcttgcgactttgttgccaaagattgggcaatatctttatcatattgactcaaccgtttttccataatagggaggtgcttctcgctataggaaatggtatggcgatactcgtctttggagcgattaaaggcgcgtttttgattttctaaaactgtcagttcattttccaactccattttgagcttaaggtagggattaccagtggctaaagccttaaagtcagaagcagtcatggtttgttcatcaatgtcttcagctgatctcacaggatcttttgaggtcattatctgcgtaatgtatttgagcttattctcctgtgtctgccagaggtaattgtcgaagctccctttagtaatatagtgataaatatctacctcctggtgcatgtttccctgacgaatcaatctaccatttcgctggacaatgtctgagggacgccatggaacatctaaatggtgaacagctttcatgcgtgattgcacgtttagacccgttccacctttttcagtcgaagccatgagaatccgtacttctccgctattgacctttctagacagtgagtttttcttctcatcagtattggcatcatggacaaaggcaatttcttcttttggaatccctcgatcgactagcaagtccttaagttcattgtaaacatcaaagccatcttccttacttttaggagttccaatatctgagaaaatcatctgagtcgccttgtctccagctccttcacggtagattcgttcgacattatcgactacttgaaggattttctgattatccgataaggaataagcagggtcaatcaaccgcatatcaatagctagttttctggcttcacctgttatcttaagcatgttatctctacttggatcaacactacctgacttgatagcgtccgaacgctctaccagctcttctaaatagtatttctgagcttgcgttaactcgctttccaccgcaataatcttagcttctggtactggtaaatcaagcatgtctgaggtttgaatatctgctgtttccttgtagattcgcatgagttcaggcagattgacaaatttcttgaaccgtttcttaggttggtacttatcacctgtcggggctagttccatagagttttcgatattcccaaaagccccaacccaggagtcaaaatttgatacctggtatcgttccaatacatcgggttgaatataattcatcatggtgaaaagttcacttatagagttagaaactggcgttcctgtcgcaaaaacgacatttctatctccatgttctgcctgaacctgtctcaccttcatctccatatctacgttcttttttgaagtggtgttggtaatgccagcgacatttccaagtccagtaattggacggatattcttgaagtgatgagcctcatccacaaagagaaaatcaatgccaaggttttcaaattcaataaaggtatctcgctctagtttttgaagttcttccaactggtgttccaatcccttaatcgaacgttccgcttctttcaccgtataatcagaatcacttcctagcttgatctctcggagttgctcgagtttgtcattgatataggtgacctgtttttcacgactcatcggtattttctcaaactgggaatccccaatgacaatggcatcatagtcccctgtgataatacgtgatacaaactgtttgcgtttggctttggcaaagtctttcttagtggtcacatagactttcttggttgggaaaaatttcatgatttcttgaccaaactgagcagtcaaactagaaggaaccacataaagaggcttgtgcaccatccccaattctttcaatttgaaaccagctccaagcatggtcaaggtttttccagaccctacctcgtgggctagtagagcacgtttttcctcgacaattcgttgaatggcattcttttggtgaggacgtaaggagatattctgagcaagtccatcaatggttaaatgactaccgtcataggtctttgataccgtacgattgtagagcctattataggtgtcttcaataatctgttggacttctggatactttgctacaaaatcttgaaagagttcttgtaggtgtgtttccttggcacgcaggactgttgttttctctacatccgtcacattctttttcttatccccttcgacaacttgttttgtgatggttggttgattggaattcaggaggttttcaaagatttttcgaccactatcatagcgtgaagcaggaacacctaaactcctatccgttgcgttggaataggtgtaggcaaacttagattggtaagtgataactccgtcaatgggactgacttcaaggactgttgctacttcttggtctgacaattcataggctttccccataaaggtttcttgggcaaattttccgtaaacagacaaaggaatccagcgtgaaccgattcgataatcaatgtctgccaaggtaatgcgggctggtttgaccgtttctagtagccctgcataatgtgaccagttaaagtcctgattgtcttgtttgacaaataggtccaccacttctaacttgctaatgacatcacctgacagaaagtcttggcgagaaacataggtcaattctccattcaaatacttctcaggatcaggtataatgaggtcgcctaactcctcaatcaaggtcatctgcgattcaacctgatagatagacatcatataagcgaaatcaacacctcgtccgtcagccaagctcgaatttaaggtatcaagggcagtatgtacctttttaacctctttttcaggacgcactagagccttctcaaaggcaagagatttagtatagataacagactttccacttggatccagactttcatcttccaaactagcaagaagcgaatacttatcatcactatcaaaaagattgcggttcacagcactattcaaatacccatagcgtttgacaaagctatcataggtacgattgagtttgcctaacaagtggttaaaagtcttcttatcatagtcataatggcgttgaatggcaatgacctcttggtaagcattgcgaatatcgaccattcctttgattcgtgccacttctttatcagacaaaggagcttcatagaaaactgtctttttataataccccttaaattgtccgcgtttagctgcatcatcggtcacatagacatccagagcagtgccatctgtaacttctaagctattaaatctatcaatctgtttttgggaatgtttggtgtcccatgctttgaagttgccctcttcatcgacatagtaactgatttcttccgtcttagttccgactcgaatgcctttattatctcgatagtaaactgtagaaccctgataaccaaaactgtactgacccagattctccctcatttcagctggaatggaggtatcaatgacttgtttgaacaacacatttggattaatgatgaccccatttctatcaatctctcttggggcttttacttgatgtagagcagtttggacacttgcaatgaagttttcactagtccccttaacagaaagtgttccgccattaaaatttctgacctcgtaggttcctagtacctggctattgtattctccatcaaagtaaggattgagccaaatgcgactatccttatcataacgaatggaacctgaaaaggctaagtcgtctgccacatatcccttgtctaagtgtttctggaagaataacatatccgttgtgacactcgttcctgcaatggccttaaaggcagaatcaggcagtcgaaccccaccaagaaattcagttgtctcacgaatatcttgtaaaatattttctgttcgcttatccatagttcctgtggaagagataatcgctacttgtccaccatcatgaaccaaatcaagtgactttttgacaaagtaatcatgaatcatgtaaggcctatcgtacctgttatccgcaattcgtatattggcaaagggcacatttgaaatcaccaaatcaaaactattgtcgttaaaagccaccgtctcaaagcccttaatttcaatgtgactattgggatgaaggtgtttggcaatagctcctgtaatggtatctaattccacaccatataactcactcttttctcttaagtgtttgggcattgctgcaaaaaaattccctgttcccatggaaggatctaggattttgccacctttaaaaccatctctttccaacttaacccacatctgacggataagggcagggtctgtataataggctgtcagagaagactgtttcatatccgaatactctttatcagtgactagacttttcaattcttctcgttccttagaaaattttggattatagtcatcaaaaaattcattggctagtccaccccagcctacatacttggcaaggagttcttgttcacttggtaaagcattgcggtgctctacttctagattttttaccaaacgaatagccgcaatgtttgtctcaaccttatctctagcagtctttggataaaagtccgtcatatcttctggaaaataaaagtccactactggaatctctggaattgtttcgactactacctcttcaggaatttgactatctgattcttcaagatcagtatcgttatgacctatttctgaactatctggttccaatagtccaatactctgaactggctcctcttccagaaatgagaataggtttaattcttggtccgcttcttctaactctgtttgtttttctgcctttggctgatgaagtgcctgactgacttcttcccaggtcctcacataaagaactggattttgttcaatgatatccgaagagtcattaactaactcaatccgaatcaaaccgttcaatcgagcatcgctgaccgacacgacctcaaagtcctgtcccttataggaaaccaatgaccccagaggataagtgtccaatactctctggactagtggattttccgcgaattcttcatcagctacttcttttccctcaactttctctagcttgctcttccaatctctgagggttaaatctggctgattgcgcttatctttttcaaattgttccgcatcttctctgctgatttcttcgtgtaaaaaggcgtaggcaatttgtcgtagctcttcaagggaaagctggctaccaaagaaaaattcaaccttttcatgacttagtcccatttgaaatagttctgtcgcaagggctagttgagttaccgaggctttgggataaccacctaataaagcaaggtccgcattttttaaacgaaaacgacctgctgcatccaataaaataccgacttggtctgattcaaactgagataaatcaatccctagctgagtcaatttttcttgattttctatcctaatggcttgtccaattttttctaattccttttcttcgactgtggtcagcgttcgtttcagctcatagggactgccatcagcttctagataggtaagtaactcctcgtcatcaaagactggtgtcatttccgtctcagtatcaaaatcacctcgtctaaaacttgggactttggaacgttcatttcgaatttggtcaaaatatgttagaatctcaaattttcgtcgtaatgacaactcttcataagctggcagatgactggtttttcctgtttgaacatctagttgagacaaatctacgtccaaactagcaataatcaaagagccatcttctctaaaagatattgcttgatgaacacttgttttgtgctcatcaacagtttcttcattttctagaacagtttcatcagctctcgtttcaagctcaggctcgtaagtcaagagaaactgctcaatatctcggctgatccgatccgctaaattattagccactcgatacacattgaccaaattagctcccctactcttttgtaatagagaatctggtgaaatagtttggtagtgtccatttgagtctaatagttgaaaacgagtggctagattgaacaaggccacttcaatcaccaagtctttttcagacggcgatagtttgtcgagtttttggagaccagtttggccgaaaacttgtgtataggtcaatagatcataagcagtatcataaggactagcctggacaaaagctgaaacatctgtctcaaagtgaagtacctgaacagatcttttgattccctgcctattggtcataaactgacgaataagactatcccactcctcatcaaaatgctctgcttggtaatataaaaatgcctcaagcagggctctatcacgaggaatggtggctctcatcatttgtagtaagacttcttgattcattttccctcccatttaaaaaaggctgagagtttttctcagccctttgcgttaatctaggaccaaggctcgttggtctctttcttgtggaataccttccattacagttgccacatagtgttgtaagaaatgacttttctggtctagtaaatctttttgcaaggcaaggtgaaccaaatctccaaaataatcctgactggaaatagccaattcctgttgaatcatggcctgtaaggtttcaaggctaagtggtgaataatcgtcactatccaaaacctcatactgttccaaggtgtctgaaagactatttgaggacattaaatccataataaaactagatccttcacctgttcggtacagcttttccagaatgtcagtcatatctgcctgtacttcatcctgataactatcaactttaactcgtagctcatcactaatcaaggataggtcatcttcatccatataatcttgataaacctgattgaggattgttctatcagaaatacttaattccaaagagagaaaggctttgataaactcttggtaatcgaccttctccatttcagacaaagcctctttcatggtgtcaaagttccaagccatcacacaactccttttgtgggactagtggtgaatgtccagattgtagctcttctaaatcagcttgaccatcaccatctgtgtcaacagactgcggattggttcccaaagctatttcctgagcatctgtcagaccatcctggtctgaatccttttcataaatgctttttggattcatctacttctcctcctttttcttcagtccataagccgtaccaagtagaatactagctccaatcaagcccaaaagggattcctgttcccctgtatttggcaaaacgcttgctggaacaggtggttcaagagactcaatcagtggttgaggtggagtgggttgatttggacttggttcttcaggttgaggtgtatgtgttacaactgtatttgaactgatgacatagccattcactgtatggagataggtattctccacctgaccagccgcaatccgtttcatttgaaggtaaacatctgcctgaaaggctgaatcatcagagacagtctctaagaaggatttatcaaatgaaattgacactaggccattttctgtatccacctgttgcaaggtatatttcgtgacttccgttccttcttttaagacagaaccgtctttgagggtgacatccgtcatcagatagctgcgataaacaccattgtactcatcatgcttttcatcatagttatcttcaaaactatattcaaataaatcagtcgcacgattacttggaatcaaagctccaaccaaacgatagttaaaggtttgatgcaaggccacttctttaccatcaaggctgtcatctttatgagacaagtcaattaccacatctttttgtgggtctagtttgggaacattattgaccactgtttccgtgacataggccaagccaaaatcaatctgataggctgtattttcatactgaccacctgttttggtcaactcatttttaaccgtcatcggaagcgtgacaactaaggtttgaccagtcttcacataggtctcataaaaggttttgggatcattgctactaaggacctgaatggctcctttaggtgtaaactgacgtttagccatggcatcttggacgactttcggagcttctggcaaactagcgtaggtgctaacagaaataccagatacacgattgccatccttatctaaaacttggatgccatcaggatctagggtaagagcttcttctgggtaatcatctaccatgtagaatcccttggcaagaacatcatccgtcacgaccatgtccttgtattgactgtaatccagtacaattttgtaataattgaccgtattcggaagaatagtctttccatcaattgaaatgccttcttgattagtattagacttatgtggaattactttagggacaaaattggtcactgtattggtttcataggcttgcccaaagtccacctgataagccacgttttcataagacttccctgaattaagcatggtttccaaaaccgtcatcggagtgacaatggtaatattctcccccttggtcacataagattcaaaaaaggcttgtgggtcctcaggcatgaaaacttgaaaagctcctttaggctgaattttttgtttcgaaagggctgcttgtagcgttttaggagcttctgataattgagaataagtcttcaccgtgattcctgaaactgttttgccgtcagatgtgacaaactgaatagctgcttcatccggcaataaagcctcttctggataatcatccacaaagtaaaaaccttgtgcaatctgagagttgtctgctttaatccctcggtattggtccaaatcccatgagagagtatagtgattttgagttcccactagcatgggcttcccattgatgtccactttgtctttattgaggttctgtttcttgggttctggagaaacaagggtgttggtcacttccttggtttcatagccatttccaaaatcaacttgataagccttgtttgtataggtctttgtctgaccgtagagactatctttaaccgtcattttggtcaaaagagctaaagaagttcctgtttgaacatactggtcataaaaggcttggttgtcatccggcataaagactagaaaggcacctgtcggtgtaattttagcacgagctaatttagcttgaaggtctttaggagcttcatttagtgaagcatagtttttaaccgttattcctgatactttctgaccgtcaagggtagtaacagccgtgccattttccaccacatcgagcacttcctctgggtaatcgtccacaaagaagaagcctcgtgcaattgtctctttagcagaacgatctcccttatactggtccaaatcccaaatcaatcggtagtggttggttgtgccaagggctacgaccgtgtcattaatgaggacaccatccgcattttcattgtttttatctggtgtaatgagtgtggttgtctccccatcacctggtgtacgaaccgttacaacatttgaagtgactgtgtaagcattggttgtacccttgttcaaaaggagtttgtaactattggaataagttgccccatcattttgaacagaaccatagagtttaggagcggtcagttgataaaccttggttaaatctttatttacctcctgcaacaagttttcctttgcggtcaaggtcacaaaattcttagtcgcatcaaagctaaggacatagtttctattctctttttgtgttatttccttatcaaataggtaaccagcaggcaagtagtcttcaaaaataagactagtcgtttgggcacgattgggcgataaggcatcaactgttaagggataaatcaccgttgaatcttttgcgacagttttctcatgaagattagcttggtcactattgaccacttctttcataatctctggagttgtcgtcaaatggtacgcatgataatggacagtgggtacttgtggcggtgttggaagttcttttggaataggtttgacaggtaaggttaccttggtcaaagttagactaggctgcaccacttcttccaaaggctttggcgtaaaggttacaggcttttctggagtaaaggtttttggaatatagatatctggtgttaccgtaataggttctggaatgggttcaagttccaccgttacatgaggtttgggactatacggtgttaatgtacgtgcaactggtagggtatttaaggcgaaccagtatgacaagccaacattctgtggcatatcaccttgcccaaaggtgactgtataggtattgcctgatgtaactgttgagacaatagctcctttataagcataacgacttgatgtggtatcccattcctcaggtaaattcaaatcacttacacggtttgaacccaacgaacgggccagaccttcattagtcacttgaacggttgagccatttatcggcacaaatttcccagatgaatctttaacatattctagaccaatgtcattatgattgagggaagagtgtgtgaagactcctggcttttctttggagaaggaaacttgtgaaccgtcttccaagaaatacttggcaactacacgaaactccatcttgtctgttcgccaatcaccgtttccgtcatttcgataggcaataaagccctctgtgggatcgtttggtacaaccaatttcacggcatcggttccagctggtgatacaaggttggtaatatcgtaagtcacacgactaatctttttcccatcaaatcgtgcatgttgaagattttgatagttaaaactaagagtctcacctgttttgaagctatcatagacaaagaatccagttgaatccaatattcttgagtagcctcccagcaaagcatcgccagttgaaataatctgatcaggatttcgagtaatggcaccatgttgtgcttgtggctcaccgttattgagattgagggcttgagcaagggcttcagaaatatagccttcttcaccttttgaaatctcggctaagtcacgttgatagcgttccaattctttggtattataggcatcaatcgcttcattctcttttctggctgcggcttctttttctttattacgttttgtaatagcttcaatctcggctgcacgatctgaaactaattgttgtttctcctgattcgcttgatctactgcggcttgacctgcacggttttcagcatcaacagctgcttgaccagcctgattacgcctttcaatggcttcattatctgcctttgccttagcaagtccagcttcattttctttttgaatggcctgatttttcgcaacaatatcatctgccttagttttctttgttagataatccgctacagcttgttcgttagttgattgaatggtttcaacagtcttgccatagtttgtatagtcaagtacagatgtcccattacctgctgaaactacttgttcatttactgtcacatcagcatctgcataccgagtttttaggtcattgactttagaatcaacccaagcgtttgtctctttaccagtttggttggccccctcgtaggcctgtgacagctccttattttcctgttcgatgcgggctttattcgattcgtatgtcgctttgtcagctttgtaggttttagtaacttcattgatagcctcaacttggttttgggcatcttcttctgcttttgaaatttgttggttggtttctgccgcagaagttgtatttcctaaatccattggactatcttcaaccgtagaaacaccttcagcctttgcttcttcaactgcttgtgttaccgtatcatgtggtacggtgacagcaatcgcaccgttatattgtccagttgaaactaaactttcagtttgttcagaaacaggggttggttgtgcttctggtaaatttgtggctggattctccgttcgttgaatggcggtgtcaaccgatggtgtcacttcatcagcatgtgcaaccgttcctccccaagcaacaacagccgtcaccatggttccaagggcaaccgaacataacgttcgatattttttactcttgcgaaagacgtgtttctcgcctttttcctgattgacaagaaagtgatgattacatgttttggtcataaatagtccttcttttcttttattctctagcaacaaactgtcactctttcctcatcataaaaaagaaggcttgattttgttatcacaatcagttcagggaaaagaaaaaagctatcggaagcacaaccgataacctctgaagaatacttaaaaataaaaaaagaggaggactgacgcatcagaccctcccagacgtgactagcacgccccaattcgatacaactatgataccactaatttcgtttttcgtcaataaatttacttaattgttgaatcgatgtttttctatttgtactgataatcttaaagagaatatcacgattattgagggaaacatcaaatcgttcaacaatttcattgaattgattgatgtagttattgaggactactgtatcaaattttagaatgttcaaagtccaaattagtagaatgaaataatcttcaatgaaaacacaagtaaatgtcgataatcctaaatcttgttttatctgttttttgagtgctttagatacaccgcttgaaaaattggcgtcaaaaatcgcactgttgtgcatggtagcattccttaaatcaataagagcattgacaactaactcgagagagtttgacctatttggaataatcgtgaaatcttgattcaatttttcacgacttgacttagttaaacttcctaaaaatctactaaactgtcctagagtaataacttcaaaataagcccagagaggaatttgataatcactttttaaataatgcttaatgacctcatttttatctgagtaatagtcaattgtatccagtacattttgtctagtttcattatactgaacgagtttgttcccatatttttcatggtcttcaggatagtccatgtaacaagctaattgatgttctaatatatcttctatcccactactagattctgcgactattgaatcgatagtccgattttttaatgctgtctctacaagcatcactattggataaaatagtccttttaactccatatcaaaattgtagattgcttcaatttccttaaatgaagaaaggggcagaatcccatctgaattggattttttaacgaatctatatcgtttataaccatgataatatcccatatttaagagtgtgacagagtcatcatcttgaatatctattttatgatttttaaagatatggtcaactagatccccagaagttaaaccagttttcgactctttttttattttttcaataattgtttccatttaaaatattcagtaacctctccttagtattataccatatcattaaacttatcaaagtaacttaaaggtagaatttctaacgaaatatttacaaaacaatatgctaacaaatccaattattgttagcatatccttttattatttcgtcgtataagcaaaactcaagctactatccactccagataatttacggaaggtatagtttggattaccattgtaattggtttcggagataaggaatgagccatctggatagactttttcgacgaaagccacatgtccgtattctgctggtgtgccatgtcctcctcccgcaaatgaaagtatagctcctgcttgcggacttgtccctgtctctccacctagactttcggctgttcgtacccaatcttggccattgcccatggtactgataattggaatcttctcaccgtttttacctttgagttttagacccagttggttgatacgggctgcgactccccaagtacattggccgtaggcataccccataccgtcaccacctcctggaacagagttttcaaaaaggtctcctcgtacagcttcaagtgcttttggatcactttgtgctgtcccaccgttgggttgactaaagcctttttcaatttggtaataccactcacttgctcgtgtctgacgttcaagtagcttatcaccactatttccttcccagtaaatgagaaagagttgggcaagactagctggactacctgaatttttgaagaagtcctttaaccagttggtgtaataaggactatccccatgcaacatgaaatccagttgtaaccctaagtcataccacttttgatgttttcctttggcatattcgagcaataaggtatgtctgcgtgacccatccgcggtatctgtccattggcctaagcctaaaccacgtttgagaatatttgggtaacgtccattgtatatagttggaccattaagtgagagccagccctcatcatcccacgaactgtctgtcgcaccaatagggggagatagatagtcgccctcggcacgtttcgggttgatggaggattctaccgaccagttacctagaatggctgcgatggcttgattggtcgcacctttgcttttaagatagtcataaattgccttggctctctcgaactcatcgccgccaaactgaccgatagttggaagaatggtggtctgaacctgaatcacttttggaaagtagaacgctggattgacatagaccaacttatccgtatcatcatcaactttttgataggtgacctttagacccgttccatccttggtttgaccaataatgtctcctgccaagacttgttgattttcaatcacacgacctgaatgaatgccaaacaaggttagtttagtcttattcactccctttccagatgtcaaaataatattctctccatcaagagataccttaccatccatcggagctacaatgacttgaccttcttttgcttctaagatgatatggtgatgaagctttggtttctcatcaatgacctcataaccatatcggtaggtcatgtttaagctatcctcatcggtctgtccctgaaagggattgtccaattcttgaagggctaaatagttgccttcttcggtcaactcctttagttcttcctggtcctcatcagacagcttgtaagcaggttccttatacaagtcagacatggatttaatagaatctccaccatttaagtccgtccacacctgactgagaaatgctttataggtcgtaccacccgtttccatgaaatcgtcaagctggtagtcttggtattgatgattcatgtaaaccataacctcatcaatcttggtgaaataggtaattcccttttcgttggttcttgtatgctccgcatcttcccacgtcatgtgggtgtagctcttactcaattctatctcatcttgttgaatgacactactacctgaaacactcatgaaaaagctcatcatcaaaaggagtatcaaaaggatgcctgagacaatccaagtcaaaggatttcccgcaaggaccgaaaagaaagtcatacttcccttaatggcttggacaaaccccttaactcctgctagactgtgctttctgacatgctttaaaaaggtttgatagcgtcttcttggtttaagaggtttctggcgtgtgaatccttttccctttttgaagttctggaatcgttcctttccatgagaaaattttgttttggtaaaccgcacaccagtctgcccacttttcacccccaccttacctgcttgataggtaaacctgccatagcgtctgagtttcaggctagtatcctttagggttctaagtccatctaaatcatcctcctgtgctatcaggtcaagggattcagatgcagctaagcctaatccagctttgactttggtagaacttttcttagacttttggactttcttgagttgtttgacttcacgcttggcaaaacttacttctttttctgcacttagccgatcaaatgatttttcttggtgaaactgaaagcgagacttcaggtatggattttctttttggaaagtaaacttgggattaactgccttttgcttttcacttagtttcacttctgacagatgttttcttgccgtccgcaaacgttcttgagcttgaggaagtcgatagttcttaatttcctttaccttcaacagtctaggagaaacataggtaatttcctttaggaacttctcttctgcttccttttggctactgagtagattttcttttaactctattttcttatcttgaaaaagagaattttgggctgattttcgaaatcttccttttttaggaacattctgttttaaggtcctaacttctttccgataatgcatacgggctgattttaagttgcttcggaagttttgcctagcctgtttgacttgctttttatcctctttcatctcatgtcctcattttttcagggtccgtactcatgatgtcaaagagcttggtgtgttgtggaatcttattcttgaatgggacaacggtggaaccggccttaattaagcccgcccctttttcaggattgaccaagtatttctccaattccttagaaagtccaagcatatgcaccaactcttcacgatcactcttagcctgttttaaaagtatcatgaactcgctattggcaataatgcgtctgccattggcatccaaaagaagtgtttctacattctgagtaatgcctgtcggtatcgccccatacttacggacacgactccaaagtttgaagaagaaatcagaggcatatttgtccaataagagtagctgcatttcatcaaagtaaatccaggtcttcttccctagcttttggtttttgaccacccgattccaaatttggtcaaagataaccatgagggcaatctgttttaattcatcgcctaactttttgacattgtaaatcaggaaatgactgtctgttttgatattggttcgatgtgaaaatatgtccagcgacccttccacatagagttccatatctagtgccaagtccttagcttcctgttcaggttgttgggataagacaaagacccattcgaccaaggatggtgtgtcaaaatgcttataggtgagtcgtgtaacacgatctatcaaggatttttcacggccatccattttacggtccaagagctttccaatccaagacaagagaaattcggatttgaccttaactgggtcctcatccatattctcatcagatagatctaagacatttaagaaggtggtagagtctggggcaatatcaatactctccccaccaaaggcttgaccgataatactgtactcattttctgggtcaacaataataatttcagtatcactatctgcttccttgagcttagttgagatgatttcatgttttgtcgccatccctttgccagctccagaagtccctaaaatcaaacctgacggagtatttaacttgccacggtcaatactgatgatattacttgagatttgattgatgccataatatttcccacccttgtcctgaatatctacggaagtccaaggggcattcacggcaatgtttgaagtcaatagagaccgagaaacaccttcgagatagttcttcccaaatggcaagagactattaaaagcagcttcttgcatataggtcaagttatcgataatcatatcattagaccctgccacttgcttgataatatcaagagattgtttgagttgatcttcagtatccgccagcacgccaattagaaatacggtgtcaaacagtttatctcctgtttgggtcatggtttgaagaagagcttcagcttcatcgatgttgttctcaagaacatggccgactttctccaaatagatgcctgtccgagccatcttttgttgttccccaatcttttgcgattccatcaaggtcttcttggttcgtagcttggtcatagtttcagacttggtggagcctttagcatgcaggctaatcatcacttccaaatctgactgcatcaagtctcgaataaatttatcccctaactccatgccatagtcacgaacataaacaatctgtaataattgatcgtccaattcaatatgattcttatgtttaaaggaaaggtaggttggggcaataaagtgtttggtggattgacctgagagggtcaaatccttgtaagagaacggtaaatgattttcacctcgtaacatatccgcaaggacattcactcgctcctctccaccgagcagaccaagagatacatcaatctctgaaaagccactcttgaaatattccccaatctgtgacagagaacgaaaagctagttttggtgtttggtcgctcttgccaaatgaaagaaacttgacagctgaaaaattgttctcacccgcctctaagttggcatccatcatgcgattcaattcatcacgataagcatcaaacccatcttcctgcaagggatagagaatactcttacggaatttttccagattgaccttttgattgaagatggtcagttggaaattggtctgatcatccagtgaattgattaaatcggaatatttctcaacaatagctcctttatcgtctaagccaactgtttgataattgacatctcctaagagataggtttgtgagaaatagcttggactgacctgcataaggccattctgaaaaagcccttgataggctaacgtatttacggtagaaggtctgttctcctgcttctgtattttcgtcttttgatttttgtcattagaagaggtctttggtttcattgagtgttttaattttttcacgttggtctccttttcttccagtaaatgtacgatctggtactgttagttcaaaatgaaaacggtacttgaggtaggtttcaaatggtaaatcgttggggcgatagaccccaaataacatgagtggaatggtaaagctaaaaacaaaaccatagacaaaccaatccccaaattgccaataaaataggttcaagcccaataccaaaatggttagggcgacagctggaaatacaaaaataacctgtctagttgtaaatcctagccatgccctgtgttgaacctttgagatgtccttaaagacacgtgtgttcataaatgttctccaatctaaataagctataaaaagaggaggagggcaatttacacccatcctcctacatccccaaaatacttcgggcggtccgttgactgccaaccaaggcaatgattaacaatatggcctgtaccaagccaccaaacataatggcgagtgattccataactccagctccatttgatacggcaatctttccagccgattcaaacaaggggacaagagatacaattagaaaaatcaaaataccttgaacggcatagaccatgatgtttttaaggtaaccaatcccaacacttctccagtcatcactaaggaaggtcggaatggtaacaggggcaaaaggaatcatcagatagagttggataaagcgaatggtaatcaagatattgacaaccatgatgctggccattcgtaccaaccaaatgagaatcgcaaaaaagccaataatcatttttcctacaattccagatcccttaatgcctgagatggtatcataattagcaccaccattcgtgacaagacttgccacttgttcaataacataagaggcaatggcaataatggcttccacaataaccgtcgtattggtaatcacgaccgcgaccatgatgtagctgacaaccataggtgccatggcttcaaaggtcattgcaccacctgagtttgcgattttcttggccatttttgaaaattcgagtacgagaacaaccgcaagaatagctactcccaaaggttgcataatccccttggtaatggctgtcatgtaagaccacaccgtcggattaaagtccgctagtgacttaaccaagttggcggttgattctaaatccacttgaaacccttcaaaaaggctatcactagatactttttcagaggctagaaatacaaaaggtgacgtaaaattcattatcatgtcatgtgctatcctcccctaaatggtaatctgagtcacaaaagcaccagcggctcccaccattaccccaccaacaatttctagaatagcatttcggacacctggtccaccatctttaatgttggttgaaaggttgataatgcccatgacaacaagaaaggctcctactgcaattaagcctttttgtaatagagacatggcttgggagaacatggagctggcgtccactccgtaaacaaagcctgatagtttttgattcatataattcctcatttctattaatgtagtgtcgtttctgtgcttaaatcccttattttatggcctgacaaatctaactcttcctcagcggttaggggattgatatgatagtgccaccagcgttcatcggtttccttatacgcaagccatttccaattcttatgtttgagtggaaaatatttcttggttcgaaaaacaggcactcctgcaattcgtacgaggcattcatctcgtttcatattcccgacttcatcagccgtcatcaagtcacgggcaattttctggtgagaggtggaacttgaacccgtctgcccaaaagaacgactggtacttctgacatcaatggtttgtttgcctaatagaccactcataaatttgaaagtttcctcgtcatttccacccaaatataggaggctgtcacagttccccagtatagttttccaagcctctttttccttataaagtccttggagttgagcgatattttgcaagataggaactaagctcatgtttctagagcgaaccgttgaggtttgttcagcgaagtctggaatttctccgacattcgaaaactcgtccagatagcttctaacatgaataggcagttgccctttaaagtcaacatcagcctgtctggtcaaagtggagaaaaccgtagagaaaaataatgcagataggaaacgaaaggtcgtatcattgtctggaataacaagatagaccatggtcttctgagttccccacgttttcaaatccatagtgtctctttgcgtcaaatcaatcaccgattggatattaaagagggaaaatttagctgttgtgaccgcaatcaccgaatccaaggtcttatccttatagttttgaaaatctgcccagtttctcatggtaaagttctcgtgaccgtattttttagcgtaatcttcaaacaggacttcaagaacacttttgtcctgattatctccctttgataacagtttgatgagtttcccaatctcagaaaaggctggataacggccacgcttacgtcttgcttcctgctcttgcttggaacttcctggtggattgtaaaaatctaccaaataagaggcaatcgctctcaccaaagtcatggaagcctcatcccaaaacggatcactgcgagaaccatttcctttggtattattaaaatagaccgttaacatgcggttcaaatcattctctgtttctacataacgaaagggattaaaaccgtctgaattggtcatattaaccaaatctaaaaccttgacctgataaccgttttctaaaaagagtttacctgtcttctcagccaaatggtctttcggatctacgacaatattggaacaattaagttggataaggttgggcttcacaaagcgaaaggtcttgcctgccccagaaccgccaatgacaatcaagtttttatttcggtcaaactgtggtttcttcttttccaacaaggttagacgaacatcacgagccaaaatcgtgtcattaaaaggattcttactgtaaaagttccgcttttccttactggttccaaatcgtgcagaaccgtattcttccccttctcgatagaccttctgtcctgtcgatacataaagatagactagtgtcatcgttagaaccccaaggataaaggcaagaagagatttttgagtaaaggaaaatagccataaaggattgaagacttgatttagcccctctcctaagaggtaggcaaaacgttccataggtggggcattggttaaactatcatagagcagggttagacgatggcagaaataaccaaaggcgagccccatgagtccaaagactaaagcttttcgtcttgaatacattacaaggtcacctccttggttttgactgccgaaggttctgtcactcttattttttctttggccagttctatctcttggtccaaggttttatcaaaggttagaccttctaacttttctggattagacatcagtttcttcaacaattcatccaagtgatgatcgagcaaggtcttatccttggcataatagtagagatagtctttttgccaactaattgcaattggcagtttttctgactccatcaactccttaaatttctccacatcgattggcttatccagtatgtctttactaacatctatcgcttcaattgcgtaagggctttgaaggagttcttccagtttttgaaccccaatcttataagctgaatcttgagctaaggcttgcctagccgaccactctaagagctttaagagggttctaactgtcaataaactacttctttccacgtattgcatcgcttgacgttcttgttgttcagatgacatggtgacctcctctttttttcgattccctctcaaacataaggtgtttccataatacgaaagcactcttgattttggtatcacaagaaagttacgacataagccaaactattccaaagtaaatgtaaggcgattgccatcatacaatcagttttcaatcgaacagcagccatggtcaagccaagacagctatacatgagccaactccctaactgattggggccatgggatagaacaaagagaaaactggtcacgactatttgtacaaaaggaaatgtcaatttttcccacagcaattgcctataaacaatttcttcaaggacacttgcattgaccagaaacaataaaaagataacatgaggaacctgctttcctacttgtaacaagaccgcttgattcctagtatgaactggaaataggaagctgatgaagaatgcaaaagcaaccacacacaaaaaaccaagaagcaaccatcttaggcgatttcttaaggtaaaattttttgcttgaacagttttatgacgggcaatttctaagcaagtcacacttaataggaccaattgtagcaagactacactctctattgtcagatactctttcaggtataaactcaccagaagactgttaagctgtatggctagaaaaaacacaactacccttatcattgtcacctcttgaataaatcttcataatcaatatctaagactagaacgattcgctcaacccatctagtttgtggcatcagacgattcgatttgtaatgtcgcagtttttgatagagacgattaaattcacttggataaacatattgacctttgaatactttgcgagctagttctgcccaagtgatttctctttctgagagtatgatttctaaattgtcccaaaatcgttcattcatcttcacacctaccctgtcacttgtttcatcagactggcctgaaacagctcttcttttacttgtctgggaagaaaggtacgcacttcgtctagcccaatggctggatagacgtgattctgacagacaatgagaggcagacgaaggttttggtctggcttttggagaatgagctgaatcatctcattcaaacttatcgtatattgacgcttaaagcgaagaaatcgtggcgacagcaactcaaaacaatccgtggttttggcaaagagtgacagtaagatttcacggtttacatcacacgcttttatacaacgataagtcaccccatagttggtcaaaatggttagtaagtcttgatttgtattggtattatttcctagatatacctcaagcataggctcctccttatagggttaggctattttcaactgttggttcaggagttgagaaatagcgactcatatcaatgggcatccgtccttcaccaaagcacttgaccgtcactagagtcgttaaaatgccctcctttcccctagcagaataattttcaccaaaggcacgaaaggccaggtgattgtctttcgtcaatagtgtatctacaccatttttaatatccctagtttccataaaatccgaaatccgatgaagattggattcgtagaataggggatcattcatctccttgtggtaatcatcttcaaaagtcacctcaaagtcacaatcaaaattggggagcgacagtatcttttgtagtaactgtttggtttcaacttggtgaatatgttcttctaattcagtacaatctaggatacttttcttatgtagtaggttcatgtttttcatcctcttctattcttctaaattctctcgcaatggcttcaataactgtgacagtcacgctattgccggcctgtttgtatagttggctcttactagaaacactctctgctctttcataagcccaatcaggaaagccttgcagtctaaaacactctcttggtgtcagtcgtctaattctcaggcgataaagttttccgtctagaacaatgcctgtaacttcataccacttagcctgtcgatattcaagagcagcaactaccactcccatattgtctgaagtcgtcagcgtattggatattccctttcccactcgtcccctacgtttggttgagtctggataagccagattgacagagtctccaagagttgcctttgcgtaccctgtttttgtggcttccttgattttcagaaatggcagctcctccctcagcaaaatttttggcaccttatctccaccttgcatggtggtcaaagtcggtgacaagccagcaatgtcaaatactcttccagtttggtcaaagctagtcggcagatttcctgcgacaacaactccgtgtctgtcttgactggtcaaagtaaacatagggtcttgattgtccttaaatcgacgaccatgttggcgtttttctagtctatctggtgttaaaactggaatggcgattttagctccctctcctttacctcttgttagtgtaggagcaagtccattcgtcagatagacttcaccattcaaaccacgtttagagggattgatatttcctagcctttcaagatgagctgggctgttttctcttctgagaggaaatatgaatctggaacggtatcttctagaatgtccaataataaagacccgctctctgttttgcgggacttggaagtccttactgttaagcacctgccattcgacatcataccccaattcatccatcgtggagaggatagtggcgaacgtccgtccctcgtcgtgattgagtaggcctttgacgttttccaaaaatagaaaacgtggttggatttgtttggccgctcgagcaatctcaaaaaagagagtccctcgagtatcttcaaatcccaatcgtctgcctgcgagtgaaaatgcttggcaaggaaatcccccgcagatgatgtccacttgccctctaaattgtctaaagtcatggtctgtgacctctttaatgtcatggtattctatttccccttctgtgttaaacatagctttataagatgttctggcgaatttatcaatttcacaaaagcccaaacactcatgaccctgtgattccatccctagcctaaaaccgcctatcccagcaaataaatctaaaaatttcatttttcctctctttccaactaaaaaagagccttacacttgtaaaactcttgcttatatatgatcatccatttctggtgcacggatgatttcaaaaatcaaaatgacgatagaaatcagatagattccacctagtatccaccaaatcatcttaatcacctccctttatttcttgtcgtctcagttgcttggtccactctgacagcacaccattaaatacatattcagctattacttccgctgaccgagcaaatcgcatatgttccaatgcatactgataacggtcactaaaataaatcatggcatagtcactagctgactgagatagacccgtctgtcttaactggtcatgaaccaaaccccaaatatagtctcgatcgtacttggtcacgccatcgacttttgaagtaaagttctcttcttgtttctcatctacttgctgcctctcctcctcgtcctcaataaggaaatcactccctttagtttcactatatttagtctcacttccttcagtctcactaggggctgaatttaagaccggccccgtatttctttgagacccccctagtgttttttttacactagccccgtctgtatgtaagactggggtagtttcatgttctaattcccccaagtaaattttatttgccattcgacctttttcactagaggactgttggacttcatcaattaagccatattcgcgtaaggttttcttgatagagagtagttttgactttgaacagcctaatagtgccatcagatttgaattggaataaatcaaataaatagccccatcctcatcaatccagcccttactcaaagacaactccaaccgatcctttaaaaccgcgtaggctaccttaacctccagcttcatatccttataacgttcactctcaaacaagacttttgggagtttataataacgctctgatgtctgatactgattagcggtaatacgtttcatgattatccctccaagactaaaagtccaacatttccgaattcatcaaatcggattaaacctacttgttccaattcatcaaccagatgagttgctttctcaatatcaactcctaaaatagccacgagatggcacatcacgatttggcgtgatgatttttccttctttttcatgaattcctccttaaaataaaaaaacgagaacacttattaaaatgttctcgttgaactattatattttatgacgtatctattttttgtctacgcagtcgacatccaaacagacattcacatcaatgtactttttttgaaccttttttatgtcaaaatcactcttttcaataaagacaaaatgcttgaaaaagtgcttaaaataaaggatttttacccgttgcttcgttgtagcaacactacgcactccacgtgtgcggtatgcggaaacatatccaccgactgaatgtaatgaacgtcgtaaactttactcaacttgaccaaatctcgagctaacgttgcagtattacatgacacataaaccattttagcaggctgatatttcaaaatagtattcaaaagcttatcatcaagtcccgtacgtggtgggtcaacaatcaaagcatccgcgcggtaaccttccttgtaccacttaggaataatatcctctgcgcgcccagcttcgtagtgagtattctcaaagcccatacgttgcgcatttttcttggcatcagcaatcgcctctggaataatatccataccgcgaacgctcttcaccttagctgcaaatgcaaaaccaattgtcccaacaccgcaataagcatcaataacatggtcattttctgaaacatcaagcgctgcaacagcttgtccatacaacacttctgtttgctgtggattcaactggtaaaaagctcgtggcgaaagcgaaaattgataatctaaaacttcctcggaaatatcagcatttccccagataacttcagttttttcaccataaatttcacttgatttagaacggttaacattaacagcaattcccttaatcatgtcaaattcagctgttaattgcttaatgacagggactaaaaaaacatctcgactagtgataaaaatcaactgcacttgattggtcgcaatagctttacgaatcataaccgtacgcaccccagcaattttacgttcatcgtaaattggaatgtggtgcttttctaaaagttcagtcacacgattaataatcgcttgcgtcaattcatcttgcaccaagcaatctctaatatcaaccaaacgatgactaccttcttcaaaaagaccagattttacacttcctttaaatgaacgtgtttgaaattgcaacttggcacgataatgatatggcacctccataccaagcgtatggcgaatatcataattctcatagccagcaggcttaaattttttcaacgactgagcaatcaaatcatccttaaactctaactgcttatcataacgaagatgcatgatttgacaaccaccacattttcgataaatcggacacgcgggctccacacgaaatttcgattttttattaatggttatcagtcttgcttgtgcaaaattacgtttaaccgctgtaatctgacaaaaaatatcctcacccttcaaagcacctgggacaaacaccaaggttttcttataaaatccaatcccttcaccattgattcccatacgcttaattttcaaaggaattttttgctttacttttaaattcattagtgattaaatatgactcctatatcttttaaattttctatcgtaacttttccaattttcggcaaatccaaaatctcttcttcagaccatactttgaaatcattgatgctataaataccattttcttcaaagacatcaagctgcgctgtcgtcaaaaaatcaagctcatccaacagtatatccattaccgtatccaaacaataactgctcaaataccccaaaagataacttgctgctctctccaccaacggcaaaacaagacgaaacgccgcataaacaacctcaatatcattttcagcatactcaagttttaaaccagaatcatcttctgccaagaccttgctcaatgacaaatccgaacgcaaacaaaagtcctcaaatccctcaacttcatcaaataatcgtttgagcaattcatgagcagtaaaatcatcatccgcaagaatcgcaccaatcaaaagaagcgtttgtagcaaataatcatttttataagaaacacaattctcacaaaaagccttagctgatgcataatccgacatcaaaatataaagtgacacaatttcataatgacaaccgtggtcaccattttcatcacatttatttaactcctcaaactgtgttaaagccttttgataaagtccatttaccttataaagcgatgctaatctcaatttttcactaaaaaaagcaaaagacatttgttcagaattcccagccaaagaatcgagcatctcttcaagagccttgatatcaaaatacaaatcatccgataaccgaacatctctaggtacaacttgttcatctcttttgccagcaaaatcaagcacatcatcgtcaaacatgaaatcatccaaatcccaaaaatcttcccctgctaactcagaaagctcttttttctgaagaattgtctcccaatcaattattttattcttatcacctttcatcatctcaccctcccatctctacactttaattctaatcccttctattttaacatttttgttataatgaatatatgaaaatcactaaaattgaaaagaaaaaacgactttatcttttagaaatcgacgctgatgataaactttacgttacagaagacactattgttcacttcatgttaagtaaaaatatggaaattgacgaagcaacactcaaagacattcaaaaatttgctcagttttcttacggcaaaaatctagcgctttatcacatttcttttaaacaacgtacagctgccgaagtcaaaaaataccttgaacagcatgatattgacagcctttatatccctgaaattcttgaaaatctcaaaaaagaaaactggattaacgacgagcaatacgttgagacgtatttatcacaaaatctcaatacaggtgacaaaggtgcctacgttttaaaacaaaaactcattcaaaaaggaattaattcccaactcattgaccaaaaattagccaatttagacttctcacctctctccgaaaaagtagctcaaaaacttctccgaaaatatcagcataaactctcaacaaaaacacttaaagataaaatcattcaaaatatgatgaataaaggtttttcctactcagaagccaaaatagcttttgaaaaccttgaagctgaaaaagatagcgaacaagaatttgaattactttataaagaactcgataaacaataccgaaaatatagtaaaaaatatgacggctacgaattaaaacaacgactaacccagtcactcgcacgaaaaggcttcagttttgatgatatagccagcgccctcagagactatttatagaaataaataacatttctaagtgtcttttttcagaaaattatgataaactataacagataagtttaattgtagaaagttggtaaggcatgaaattacctaaggaaggcgactttattacaattcaaagttataagcatgatggtagtttgcaccgtacatggcgcgacactatggtactaaaaacaacagataatgctgttataggagttaacgatcatacactagtcacagaaggtgatgggcgacgttgggttacgcgagaaccagctatcctttattttcataaaaaatactggtttaacattattgctatgataagagataacggtgtttcatactactgcaatcttgccagtccatatgttatggatgaggaggctcttaagtatattgactatgatttagacgtcaaagtttttgcagatggagaaaaaagactacttgacgtcgatgagtacgaattacataagcaagaaatgggctactctccagacattgattttattctaaaagagaatgtcaaaattctcgttgactggattaataatggcaaaggaccgttttcacaagcctatattaatatttggtacaaacgttatcttgaactgaagaatcgttaaaagttgcaagcactcctttttggagtgcttttacactacttgaaaggagtaactcacaatggcatttgaaaaaaccaaagaacgttacgcaagctttggcgtcgctactagcttaccacatgaaattatagatacattttgggatttattagaccactacctaaaaaatgttgtcccacttgacccaattttaacatttagactagctaataatcataataatgtaacgtttgaatatcacgacagcaaacgaaaaatcttcattggttttgattacaacttcccgttcgattcctttttcccagaaatcgtacacatcattgaccaagcaggcgtagaaacactcctactcccacacgaacttgattaataataaaactctctactatactaattgaactacaccccaatcgttagattttatgcctaacttttggattcagtacaaattgtgtagagagtttttatatatctaaaacaaaatagtttttgtccgcctgcgttagcattgttttggaaccattcgaaacagcacagctcaaaaagctctgtaacttttaagtagaatcccaactactaaaaatcgaaacaaaaccaaaaaagaagaccaagtagtcttcctcaacctttttaaaaaataaataaaatagtccgtacgggattcgaacccgtgttaccgccgtgaaaaggcggtgtcttaaccccttgaccaacggaccatatttctaatgggcacaagtggactcgaaccaccgacctcacgcttatcaggcgtgcgctctaaccagctgagctatgcgcccgaacgctaaaattataaaaggttatgccggctacatgacttgaacacgcgaccctctgattacaaatcagatgctctaccaactgagctaagccggctactttcttattaatgcgggttaagggacttgaacccccacgccgttaagcgccagatcctaaatctggtgcgtctgccaattccgccaaacccgcatattaatatgacccgtactgggctcgaaccagtgaccctctgattaaaagtcagatgctctaccaactgagctaacgagtctaacggtcccgacgggaatcgaacccgcgatcttcgccgtgacagggcgacgtgataaccgctacaccacgggacctttggtatatttaccttcttaatgggagttaacgggatcgaaccgctgaccctctgcttgtaaggcagatgctctcccagctgagctaaactcccttttgctaagcgactaccatatctaacagggggcaacccccaactacttcaggcgttctagggcttaactgctgtgttcggcatgggaacaggtgtatctcctaggctatcatcacttaactctgattgattatccaatcaaaattgaatacctatatattctaacaagtttccgacgcgctgtcaattctctcagttactttggataagtcctcgagctattagtattagtccgctacatgtgtcaccacacttccactcctaacctatctacctgatcatctctcagggctcttactgatattaaatcatgggaaatctcatcttgaggtgggcttcacacttagatgctttcagcgtttatcccttccctacatagctacccagcgatgcctttggcaagacaactggtacaccagcggtaagtccactctggtcctctcgtactaggagcagatcctctcaaatttcctacgcccgcgacggatagggaccgaactgtctcacgacgttctgaacccagctcgcgtgccgctttaatgggcgaacagcccaacccttgggaccgactacagccccaggatgcgacgagccgacatcgaggtgccaaacctccccgtcgatgtgaactcttgggggagataagcctgttatccccagggtagcttttatccgttgagcgatggcccttccatgcggaaccaccggatcactaagcccgactttcgtccctgctcgagttgtagctctcgcagtcaagctcccttatacctttacactctgcgaatgatttccaaccattctgagggaacctttgggcgcctccgttaccttttaggaggcgaccgccccagtcaaactgcccgtcagacactgtctccgatagggattacctatctaggttagagtagccataacacaagggtagtatcccaacaacgcctccaccgaaactagcgtcccgatttcgtaggctcctacctatcctgtacatgtggtacagatactcaatatcaaactgcagtaaagctccatggggtctttccgtcctgtcgcgggtaacctgcatcttcacaggtactaaaatttcaccgagtctctcgttgagacagtgcccaaatcattacgcctttcgtgcgggtcggaacttacccgacaaggaatttcgctaccttaggaccgttatagttacggccgccgtttactggggcttcaattcacaccttcgctaacgctaagcgctcctcttaaccttccagcaccgggcaggcgtcaccccctatacatcatcttacgatttagcagagagctgtgtttttgataaacagttgcttgggcctattcactgcggctgactctaagccagcgccccttctcccgaagttacggggccattttgccgagttccttaacgagagttctctcgctcacctgaggctactcgcctcgactacctgtgtcggtttgcggtacgggtagagtataattaacgctagaagcttttcttggcagtgtgacatcactaacttcgctacttaacttcgctccccatcacagctcaatgttatagatataagcatttgactcatatcacacctcactgcttagacgtgctcttccaatcgcacgctttagttagcctactgcgtccctccttcactatatactctagtacaggaatatcaacctgttggccatcggatacacctttcggtctctccttaggtcccgactaacccagggcggacgagccttcccctggaaaccttagtcttacggtggacaggattctcacctgtctttcgctactcataccggcattctcacttctatgcgttccagcgctcctcacggtacaccttcttcacacatagaacgctctcctaccatacctaaaaggtatccacagcttcggtaatatgttttagccccggtacattttcggcgcagggtcactcgactagtgagctattacgcactctttgaatgaatagctgcttctaagctaacatcctagttgtctgtgcaaccccacatccttttccacttaacatatattttgggaccttagctggtggtctgggctgtttccctttcgactacggatcttagcactcgcagtctgactgccgattatatctcattggcattcggagtttatctgatattggtaatccgggatggacccctcaatcaaacagtgctctacctccaagagacttaacatcgacgctagccctaaagctatttcggagagaaccagctatctccaagttcgtttggaatttctccgctacccacaagtcatccaagcacttttcaacgtgccctggttcgggcctccagtgagttttacctcaccttcaccctgctcatgggtaggtcacatggtttcgggtctacgacatgatactaagccgccctattaagactcggtttccctacggctccgtctcttcaacttaacctcgcatcatatcgtaactcgccggttcattctacaaaaggcacgctctcacccattaacgggctcgaacttgttgtaggcacacggtttcaggttctatttcactcccctcccggggtgcttttcacctttccctcacggtactggttcactatcggtcactagagagtatttagggttgggagatggtcctcccagattccgacgagatttctcgtgtctcgccgtactcaggatactgctagggtttaagactatttcgattacgaggctgttactctctttggcttaccttcccaggtaattcttctataatcttgcgtcccacaacgcagtcctacaaccccgatgtgtaaacacatcggtttgccctcttgccagttcgctcgccgctactaaggcaatcgcgtttgctttctcttcctgcagctacttagatgtttcagttcactgcgtcttcctcttcattaccttaacagtaatgagtgacatgcatcacatgccgggttcccccattcggacatctctggatcaatgtttacttacaactccccaaagcatttcgtcgttagtcacgtccttcatcggcttctagtgccaaggcatccaccgtgcgcccttattaacttaaccttattttggtcttctgaccttaaactcattaaatcacagcgtttcggtttatttcttgttactttctacaattatttctaattgcggaatttgatatagatattcaattttcaatggacaatcaccttgaatctttcgattcaatggagcctagcgggatcgaaccgctgacctcctgcgtgcaaagcaggcgctctcccagctgagctaaggccccacaagacctctcaaaactaaacaagacttcccaaacgtgcttccgttttttccttagaaaggaggtgatccagccgcaccttccgatacggctaccttgttacgacttcaccccaatcatctatcccaccttaggcggctggctcctaaaaggttacctcaccgacttcgggtgttacaaactctcgtggtgtgacgggcggtgtgtacaaggcccgggaacgtattcaccgcggcgtgctgatccgcgattactagcgattccgacttcatgtaggcgagttgcagcctacaatccgaactgagattggctttaagagatttgcttgccgtcaccgacttgcgactcgttgtaccaaccattgtagcacgtgtgtagcccaggtcataaggggcatgatgatttgacgtcatccccaccttcctccggtttattaccggcagtctcgctagagtgcccaactcaatgatggcaactaacaataggggttgcgctcgttgcgggacttaacccaacatctcacgacacgagctgacgacaaccatgcaccacctgtcaccgatgttccgaagaaactttctatctctagaaatagcatcgggatgtcaagacctggtaaggttcttcgcgttgcttcgaattaaaccacatgctccaccgcttgtgcgggcccccgtcaattcctttgagtttcaaccttgcggtcgtactccccaggcggagtgcttaatgcgttagctgcggcactaagccccggaaagggcctaacacctagcactcatcgtttacggcgtggactaccagggtatctaatcctgtttgctccccacgctttcgagcctcagcgtcagttacagaccagagagccgctttcgccaccggtgttcctccatatatctacgcatttcaccgctacacatggaattccactctccccttctgcactcaagtttaacagtttccaaagcgaacaatggttaagccactgcctttaacttcagacttattaaaccgcctgcgctcgctttacgcccaataaatccggacaacgctcgggacctacgtattaccgcggctgctggcacgtagttagccgtccctttctggtaagttaccgtcactgtgtgaactttccactctcacacacgttcttctcttacaacagagctttacgatccgaaaaccttcttcactcacgcggcgttgctcggtcagggttgcccccattgccgaagattccctactgctgcctcccgtaggagtctgggccgtgtctcagtcccagtgtggccgatcaccctctcaggtcggctatgtatcgtcgccttggtaggccgttaccccaccaactagctaatacaacgcaggtccatctactagtgatgcatttgcatctttcaagcatctaacatgtgttaaacactgttatgcggtattagctatcgtttccaatagttatcccccgctagtaggcaggttacctacgcgttactcacccgttcgcaactccttctactctagcaagctaaagtagtcagcgttctacttgcatgtattaggcacgccgccagcgttcgtcctgagccaggatcaaactctcatttaatcttgttctcattctgtcactgacagatttattttcttaacaggtcgatttctcaacccgcacgtttggttcgtcttgttcagttttcaaaggtctttgcctcttgcgagacaacttctatattctatcaaatctgaaacagcttgtcaaccactttttcaagtttttttcaactctgtttcaaaccgattgccgccgcacccctctcggacaacagctatattagtgtatcatccaagaaattttttgtcaacatcttttttcaaaaaattttcaaggttgcaattcttgattgctgataaattcgctgctcaattgacagccataatagcttatcatttcatgacctattttgtcaatatcttttttggcatttttcagactcttaggaataaaaacttatctcaatgtcttaaattaacacttaaaaatgcagattatcattgatattttggtcttaataaaaaatccgcaaattgcggatttctgatttgttagtaaattattttgcttcaattaagccaagttcaccgtcttcacgacgataaagaacgtttgtaacaccgtcttctgcatctgtgtagataaagaagtcgtgtcctaaaagatccatttgaagaagcgcttcatcgatgtccataggttttagactaacgtgtttcgtacgaacaacttttaccactggtccttcttccacaggctctgcttcaaattcacttgtaaaaatttgactagctggtaatttttcacgatgctttttagcaatttttgttttgtttttacggatttgacgttcaattttgtcagttaccaaatcaattgaaccatacatatcttgtgagacatcttctgctcttagcgtaatagaatcaactaaaatggttacttcaactttggcagttttttcacgataaactttaaggttaacacgagcgtctaaaccttgttcagcatggaagtatttttcaatctttccgagttttgattcgacatagttacggatagcatcagttacttcgatgttttctccacgaatactatatttaatcataaaacacctctttctcgctataaagcgctttctttactcctttattatactgctttcatgaaaatttgcaagcatttaccgcacaatcgtaaaactttttacattttttgcgccattttcatagaaaagttgatatattccttttaaagtggcgccagttgtgtaaatatcatcaataatcaagacattttctggcacctttgaaacattttttaaagaaaaaggattgagagtttctaggcgctcttttcgtgttttatcggactgtttactgatttctctcttgattagtaagtcttcgtaggagattttagctgcttgtaaaagcgctgttacttggttaaattgtctttcttttagccgttttggacttatgggaactggaacaaaggtgtaatttttatatttttttaatgcttgtttgagttcttttgaaaaaacgtgacttaaaaggatatctccttgaaatttatattttgagaaataatctttcattgaagaattgtaggtaaaaagcgcttcatgagagacgtgatgatgttgtttttcccatgcttgacaatctggacattgctgagaaaatccatttcggcagcagttagggcaatgaacatctcctattctttcaaatgttttttgacactccagacaaacgccgttgtcatctttcttcattaagatgaggtttaaaaattgttcttttttggaaaattcttgtccgcagagcaggcaaatcatgcaaatcctccttttttattcatcgctttaatttcagcaatagcttttctcatttctttagtgctaccgtcatgcaagaataacagttctcctgttggacgctctgctgctctcccaactcgccctgaaatctgaactagcgcgcttttggtgtataatctatgattggcaagcactacaaaaacatctacgcatgggaaagtgacaccacgttctaaaatggttgttgttaccaaaatagaaagttcttgtttcctaaatttttctacaatttctaagcgattttctgttttactagacacaaaagcgatttgttcttctggaaagtaagtttgtaaaatttgagtaaaggcttctccttgttcgatatttgggaagaaaattagcaaaggatagcaggtttgacgttgtttttttagaagatttattaatttctggggaattttcttcttttgcatattggataaaacgccagacaaccagattttttgtggcacaactaatggattggcatgaaagcgtcgagcaaggtgcaatttggtcagagttcctgtttttacttttttatctaattcatctgttgatgtcgctgttaaaaaaatcttggttccattaggtttgatagctttatcaacagcatggtaaagcacggcattatccacaaatggaaaggcatcaacttcatcaataattaacaaatcaaaagcttggtaaaattttaaaagttgatgtgttgtggcaatgattaaaggggcacgtttgtagggctcagaatctccatgaagcaatgtaatcggacacgaaaaatcacgtgacaagcgtttataaagctccagacaaacatcaattcgcggacttgctaggcaaacacaaccaccgtcatcaattattttggatacagattggtaaatcatttctgtttttccagcacctgtaacagcatgaataagtaggtctttcttagcatcaatgccttctaacatcccttttgaaacgtcatcttggtaaggagtcaattttcctttccaaataagagaatcttttttagaaaaacgtttttgtggaaaataatagagatgtccattactcgtatttcttccaaaaacaaggcaatttcgacaataaaaaacgtttgtttgaagtttattttgtaaagacacttgactaccacaacgattgcaaacataatgatgatttaattttgtcattgctggtaactgtttagcctgcttttttaaggcatccgaaagttgagcttgtgtaaatagtcttccataataattatccagtttatccatactttatttattcgaaaatttttgctaaatagcttaaaatcttgtaaaattttggtatgaactataaaacgattaaaaatgatggtatttttgaagaagaaattaaaaagtcacgctttatctgtcagttaaaacgagttaacacagaggaagaagggcgtcaattaattgcacaaatcaaaaaagaacattataaagcaacacattcttgctcggctatgattattggtgaacatgctgaaatcaagcgttctagcgatgatggtgagccaagtggaactgctggtgttccaatgctaactgttctagaaaaacaaggcttgaccaacgttgttgccgttgtgacacgttattttggtggtattaaattaggtgctggtgggcttattcgggcttattcaggcagtgttgctaatgctctcaaggaaattggtctggttgaggtaaaagagcaagaggggctcaaaatcaccctttcttatcctcaataccaaacctttgctaactttttacaggctgaaaacctgcaagaatttgatacagaatttcttgaaaatgtcacaacctatatttaccttgaccctgacaatgttaaagaagttagtgggcgtttgattgaattttaccaaggcaaagttgactttactaaatcaggttcaaaaattgtcgaagttcccttgtgatagtatttttttatcaccttgataagaaatatgtattttacaaaggaattgattaggcatatacttttatctataaatttttaaatcaataagaggtgaacatatgtcaaaaatttacaattcaattactgaattaattggaaatacaccaatcgtaaaacttaacaacatcgtccctgaagatgctgctgatgtttatgttaaaatcgaagctttcaaccctggttcttctgtcaaagaccgtattgcccttcgtatgattgaagatgctgaaaaagcaggcacaatcaaaccaggagatattattgttgaaccaacttctggaaatacaggaattggtcttgcatgggttggcgcagctaaaggctacaaagtgattatcgttatgcctgaaacaatgagtgttgaacgtcgcaaaattattcaagcttatggtgctgaactcgttttaactcctggaagtgaaggaatgaaaggggctattgccaaagcaaaagaaattgctgaagaaaaaaatggttgggtgcctcttcaatttgctaacccttctaaccctgctgtgcacgaagatacaacaggtgctgaaattatcgaagcttttggtccaacgggtcttgatgcctttgtttctggtgttggtactggtggaacagtttcaggtgtttctcatgctcttaaaaaagctaatcctaacgttcaagtttatgctgttgaagctgatgaatctgccgtgctttctggtgaaaaacctggtccacacaaaatccaaggtatttcagctggtttcatccctgacactcttgacaccaaagcttatgacggtgttattcgtgtagcttctgacgatgctatcattactagccgcaatctcggtggaaaagaaggattccttgctggtatttcttctggtgcagctatttatgcagctattgaaaaagcaaaagaacttggtaaaggtaaaaaggttctcgcacttctcccagataacggtgaacgttacctttcaacatctctttatgattttaacgactaatgtcaccaattatgttaactttccttaggttacatttctctcctctatcattaaaataattatctatgtataaaagcaaaagcctatcacagtgactgtgataggcttttttattattctttcgtcaataattctaggctttcttttgtccattttggtaaattgtccgccaatggttgaaagccaatgtttagatggctatttgaaaagcggtgacgacggtgtaagtgatgtttttcttcctccagtgtgcgaagagataaacttgctttttgcgtaaattcatcaaaatcaacaacttggactaaaactttttcaccaacactgagtaattggtaaatgttttcaatataacctgttttaatttctgaaatatgaataagacctgttgtcccattatctaatgcgacaaaggcaccataaggttttatacctgttattgttccagtgattttgtcgccaattctcattagtccactacctcaattgtttcgataacgacatcttcaactgggcggtcttgagcgccagtttcaacgttagcaatttcatctaaaactttgtatgaatcgtcgtccatgatttggccaaatacggtatggcgacggtccaagtgcggcgttccaccatttgttgcataaaattctgcaattggttttggccaaccaccacgttctaattctttttgagcataaggaattttgctgttttgaacgataaagaactgactaccgtttgtatttggtccagcattagccattgaaagagccccacgaacgttataaagttcttctgagaattcatcttcgaagctatcgccatagatagattgtccccccataccagtaccagttgggtcaccaccttgaatcataaattcagggataatgcggtggaaaataataccgtcatagtagccatcttttgacaaggcaataaagtttgcaactgtttttggtgcgtgttctgggaagagttgaatcttcatatcaccgtgattagttttgattgtcgcaactggaccttcaactgttgttaagtcaacttgtgggaaatttaattgtttttctaccaaaccgagttcctccaaagcatataaaatgccatcttcttctactatttttgttacaaaatctgctttttctttgagttcagggactgcattgcccatagcaatcttcaagccaacataatcaaagatttccatatcatttggaccatcaccaaacatcatggcattgattggttttaagttttgactttctagaacgtgcgcaacacctgaagctttagaaataccatttttgacgacatcagatgaatgttcatgccaagggactaaacgaatttctgcagctaattcatcaggtaattgcaactgagcattattttccgtaaaggtccacatatgataaacatcatttgtcaaatagaaatcaggctcaacgtcgcagacaccgtatattggtaccattgcgtcatcgattaggtcacaacgagctgaaacaactggtttgtcttttccagcaaaaccgtattcaattccttctgacttagcccaagcaacgtatttttcgacaatgtctcgtggcaacgggtcattaacaatttctgttgcttttttatcgatgacatatgtgccattaatcgtcacgaaataatcaggctctagagcgcgaatttctggcacaacgccataaagggcacgcccggttgcaatcccagtcatgatacctttttcttttaagcttttaaaaacatacttaattgattctggcatataggctgttgcttttacgcgcaaggtgtcatcaatgtcaaaaaagacaattttagtttttttagccttgtatttagtttttacatccatctgaaaattatgggaaaggaaaaggtcatcagaatctcattttccataaaagtgacatcactttcccattttcctttctaattaaaaatcaaagaaaagccatggttatattatatcattattcgtcatcttgcggtactaaatgatgtttaaaggcataaacgactgcttgtgtacggtcatcaacttctaacttagctagaatatttgaaacgtgtgttttgacggtttttagtgagataaatagctcatcagcaatagtttgattatcataccctttagcaagtaatctcaaaatatcacgttcacgcgctgtcaaatcttcatgcaattctggttgcatatcatgagctttgatttttttatcgacttctgtttcaatagctaactcaccacgtgcaactttctgaatggcatttaaaatttctgctgcgctagatgtttttaacatataacctttagcacctgcttcaatgacaggataaattttttcgttatcaaggtaagatgttaaaacaagaattttagcttccttccattcttccagaagcttcaatgttgcttcgacaccgctcatttctggcattaccaaatccataacaaccacatctggttttaattctaaagccaaattgataccatctaaaccatttccagcttcgccaaccacctcaacatctggttgcaaattcaaaaaactttttaaccctaaacgtaccatttcatggtcatcaactaggataactttaattttctgggtcatcttctttctcctcgtttcctccctttaccagtggcaaacgaatatccattgatactcctttacctttttgactcagtaatgtaactgttccagccatatcatcaacacgttcttcaatattactaataccataacttaaatcatgactttcatccatatcaaaaccgacaccgttatcgaccattttaagttgaagctcggtttctgtttgatttagataaacctctaaacgactggctttagcgtgtttaagggtattactaatgaattcttgtgcaattcgaaaaacgttatcctctattttcttaggtagttgaccgatatttttcttataaacaacctctatactactcttatctgtcaattctttcaagaggatatcaaaaccttctgaaagggttttattttctaattctgttggtcgtaaatgcaatagcaaaattcgcaaatctttttgagcattttgtagcatgctttcaacagccgtcaattgaaattctaattgctctttttcaatttggtcaagattagcagacacgcctgaaagaatcatcgaagaggcgaataattcttgactaaccgtgtcatgcaagtcacgcgcaattcgttttcgttcttgctcaacaatttcttgactgtttagaatacgactattttctgtattttgcaaactatttgtcaaatgcgtcatttttttagacaaacgcgataaattcgtattgatttctgtatcttcgtctagactgataggctgattattcaaaatacggcgtaagttttggttgatgccacgtttgctgttatcatctaaaataacccaaagcaaaagcaacaaaatcgttactgctaggattaaaaagacaattgaaaagacaaattgttctcccatccagaaatctgtgataagatttttcagatgcagatttaaactatccaaaacaacgataacgattgagatgataataatgctcgcataaagaataaataatataaaatgatgttttttcatttgcgcaccacctcaacatctccagcaagcgtactaacgataattttcactgcttttaaatactcttcatcctcactatgccataattttaacgattcattacgtaaatcatattcttcaaaatcaaagtaccgaacgctaccataaatcgcactaacatctaatttcacagcaacatcaataggcaccaaaatttttgttggaccaaaaacttttcgaatgacaacgacattatcctttccagttacaatgacattgcttaaatcaatcgtatcacttcctgtcaaacggataatattaatatcatcaaacgcataaaaatcactatcgtgcgtatccattccaatccattgattacggacaggctttgcctttaattcttcctcacgaaaacgcaccaaagcatagcgattttttttcttaacttgtgaaaaatgattgataacaacgtaaacaacacctaataccaccgccatgataatataaggattaagcataaaaatcaaaaataaaagaacaagaccaatggtcaataaaaaattgttccgtttatcttgattataaaatcgcagtgccaataaaatcaaaacaagaataagaataaaactcgatagattatttgccatgatagtcatcaagcccatcacaatcaaaatcgtttctacaatgacaaaaaattgaactttcctcatatcataccctttctttttctgtattttaccaaaaagctgccaaaattgcaggtttctaactaaaaaagcaacattaaaagcctaggaaattctcctagacttttaagtcattattcatcacttgtttctgtcgatgagctactgtcatctgtactactgcttgatgaacttgattcttttgattcagaggattctgaacttgatgatggtgcttgtgagctttcttcttcatcagctgctaggtaaagtaccacgttatcacttagtgtatcaccataatatggtgtctgagcagtgacagttgctgttgaagatggtgagcttacttgcacataacccgtagaagaatttgggtcggcttgataaaccgtaatatgtgaacttgacacacctagagccgtcaaggcagcaatagcttctgaataagtatagcctgtcagatttggcattgttactgtgctttctgcggctactttaaaggtaatcttatcatcgccacttaccttaaaggtttcaccttcgctaggcgtttgactaatgataacaccttcgtcatagtctgacgttgagacttcttcaatctcaatttgcgactctgaaacaccataattattaaccaaatctttaacggctgtttgataatcttgacctgtatagtcttttatcttaaatcctgatgagccttttgatacgtaaatatcaattgatgacccttcttttttcgatgaaccagcagttggacttgtcttaataacataaccactctcaacggtatcacttgatactttatgaacggttccaactttaagacctgatgattttatcgttgtttttgcttctgataaactagagccagcaacatctggaacactcacggttgatggtgaggtcaacgtcaagtaagtaaagatagcaatagctacaatcacaactgcaaaaaagattttcattaacgtgccgaacatacgacgtgattttttcttctttgttttagccttagtcgctttgttttctgttgctgctttatcttctttagctgctttttgtttcttcaagagttgttctgtcgttgaaggaacagatgttgatgttgttacctttggaagtgtctttgtattttcagtatcttcaaaaacaagtttaggttcacggctacggttgtaagaaagtgccgtcatcaaatcacgactcatttcaaaagttgacgcataacggtcacttaaacgttttgcagtcgccttgataacaacattttctagtgcttgtggcacatttttattctcatcaatgatggaaggaagtggtttttggaaatgttgaagcgcaatggtaacagctgaatcgccatcatatgggatgtgacctgttaacatttcaaacaacataatccccatagcgtaaatatcactttgaacagtcgcttttgaaccacgtgcttgttcaggcgataaataatgcacactacctagcattgaattggtttgcgttaaacttgtttcggcaaaggctacggcgataccaaagtcagtaactttaacagttccgtctttggttaataagatattttgtggttttaaatcacggtgaacaattccttgttgatgcgccaaagtcatcgcagataagacttcttccatgattctaacaacttcattattagaaagcggagcatgatcttgaatgtattttttcaagtccgagccatcaacatattccattactaagaattgctgtccgtcttcttctccaatatcacgaatcgagacgatatttggatggttcagttctgccatggcacgcgcttcccgttggaaacgcgctacggcaatttgatcagtctgataattcgtccgaagcaccttaatggcaacttcttcattatcaagaatgagatcttttgccagataaacatctgccattccaccccgtccgatagatttgaggatccgataacgaccagcaaataatttgccaatctgaatcattaagcttcctcactttcggcgtggattaaagcaatggtaatgttatcaagacctccacgttcgttagcaagagtaaccaactcattgttcttgtcatcaagatttttatcttgacttaaaatgctaacaatttcgtcattggtaatcatattagttaaaccatcactgttaataatgagatagtcattttcttcaagtacctgaacacctaaatctggttcgacagggtttgcttgtccaatagactgtgtaatgatatttttttgaggatgatttgcagcttcctcttcagtcaattgaccagcttttaccagttcattaactaaagaatgatcacttgtcaacaatcggtattctccttggtggagcaaaccaatgcgtgaatccccaacgtgagcatagatgacattgttatcaacaattgccaaggcttctactgttgttcccatgcctttatactcatcagtttgaccgagttcatagactttgcgattttcagcttctaatgtcactaaaagccaatcacgaatctgacttaactcagtgtaatcggtattaatccattcacgtccaagatctgtaacagtcatttcgctagcgatatttcctgcacgatgaccacccatgccatctgctaaaataaccaaagtaatgccgtttttattatcaaatttgttaataaaatcctgattgtttgaacgtttttgtccgatatcagttacaagtgaaattttcatagtttttcttctgactgtgtcagtttcctccttgagattacaagatacgtttgacttgtcctataaagaacccgtctgtctgatattgttctggggtaattgcaatacatccatctctaacaatatcttcttgcgtatgactcagttttacttgttcaaaatttggatgagtttctaaaaatttgtgaataacttggaaattttcctcatcaaaaattgtacaagtgctataagttattataccacctttacgcaacgtttgacaaacgctatcaagtatttgcagttgaatttcttgcagagccgagaaatcttgattttctttattgtacttaacgtccggtttacggcggattaagccgattcctgagcaaggggcatctaccaaaatcttatcaaaagaatctggcgcaaaatgctcatgaacagttgtggcatccattttttgtgtgctgattttatcagcgacatgcaggcgcttggcattatccatgacaagcgttaatttatggtcatataaatcaagtgctgtgatgtgcccttcttttaaatacgaagccatatgagttgtcttaccacctggggcagcgcaggcatctaaaatgtcttcatttccttgaatattgagcgttggagcaactagttgactagattcatcttgaattgtgatatcaccattagcaaaataatctgtcccagcaaaatgtcctgatgttttcaccaaaccaactggcgataagatagattgctctgcaccagtcgcagctttaatctcagctaatttatcaggatctgtcacacgaatacttgccttattgcggacaaaaaggctttgcataatagctgccgcgcgttcttcaccgaattgatcaattaattttttgactaaccaaactggcaatgaataaagcacagagtaacgtttattcttacgtttaatcgttttaggatttggtaattcttccttggtaaaacgtcgtagaacagcgttgacaaatttttctgcaccttttttgttaccgcgatttttagcaatgttaaccgcgtcatttaccacagcgtgggcaggaattttatcaagatacacgagctgataaaggctcaacattaataggtaataaacccaagaatctaacttatcacggtctttaatgtaatgagcaagataccattctaaggtaatttttcgtgcaactgttccataaacgatttctgtcactaaagacttatcttttggcgataatgtcgtatggcttaattcttgattgagagcaatattagaataagctccgtcttcaaagacattttcaaggacaagaagcgctaaaccacgtgcctgatttttccaatcattcgccaataaggtcacctacttcgagcttacgtcctacaccattaaggaaatcaacaatgctcatgcgtggcttcccagctggttgtactgttttaagcgaaatcgccccgtcacctgttgctacgacaagtgatttcttacctttttcgataatttcacctggttttccgtgaccttcagctaaagtcgcttcataaatcttgaaacgtttgccgtcaagaagggtatgagctactggccatgggtacaagccacgaatgtgattaaagacatcacgtgctgatttattccagtcaatgcgttcttgttctggtgtaatatttggtgagaaagtggctttactttcgtcttgtggttctggtttgatattgcctgcaatgtaatctggtaatgttcttaacaacaaatcacgtccaataacagccaatttttcaaacattgttccaacattatcatcgtcagtaatcggtgttgaagccttggcaatcatatcaccagcgtccattttcttaaccatttccatgattgtcacgccagcttcttcttctccgttaatgattgcatagtgaattggtgcaccgccacggtatttgggaagaagcgaagcatgaacattgaccgcaaaatcaacagaatcaagcaatttggttggtaaaaattgaccaaacgcagctgtcacaatgccatcagcacccaaagtcatcagctctgccatttcttctgaaccagacattttttcaggttgataaactggcaaattgtgcgccaaagcaacttccttaacaggtgtcattttgatttcttttttgcgtccaacagcacggtcaggttgcgttaccaccgctaggacatcgtagttgctatcatctagcaaaccatttagaacagccgctgaaaaatcaggtgttcccataaaaattaattttgtcatttcagttcctttcaaaggattttcttacttaaattttctctattatagcatagtcatccgctacatgaaattttgtggctcatagtcaatgactaagcgtaaatttttattttctggtaattgtgtcaaatctaaaatctggttcaggacattctctaaattgtcctcaaagcgatatttaacgataatttgataatgataaagattatgcgttctggcaatcggttttggtgtcggaccgagaattttgattttatctgataattgctggcgcaataattgcaagagttcaaatgatttacggacaacggtctgctcatctttatgtgataaggtcaatccgaccgtgaaataataaggcggataagctaattgcctacggattcccatttcataagcgtaaaatgcctcgtagtcttgcttttgcgctagttgaatggcatagtgctgcggattgtaggtctggataagaacctcaccttctttttctgcacgtcctgcacgccctgcaacttgtgtcaacaattggaatgtgcgttcagaagaacgaaaatcaggtaaatttaaagacgtatccgcatttaaaactcctaccaaagtaacatttggaaaatcaagtcccttagcaatcatttgtgtgccaagtaaaatatcggcttcatggttgccaaatttatccaaaatgcgttgatgagcccctttttgacgtgtggtatcaacgtccattcgtaaaatacgagcttgtggaaaaacttccacgagttcatcataagccttctgtgtccctgttccataataccgaatactacggctatgacaattcggacaagtgtgtggaatggatttttcaaaaccacaataatgacaattcatggttttggtatccatatgcagcgtcaaggaaatgtcgcaatttggacattcatcaacatagccacaatcacggcacatgataaaactagagtaaccacgacgattgagcatgagcacaacttgctcatttttttctagacggtcagcaattttttctaagaggtacggagtaaaattgctaacttcttgctgtccaacataatcgcgaaaatcgacaatttcaacttttggaatctttgccataggattagcacgatgtgtcaattgtaggaattggtaaacaccacgactagcacgagcacggctttcaatgcttggtgttgccgaacccattaataatacggctttatggtatttagcacgaagcaaagccacatcacgcgcatggtagcgcggattggattcttgcttgtaagtcgcctcatgttcctcgtcaatgataatggcaccaatattttcaataggaacaaaaatggcagagcgtgccccaacaacgacacgcgcttgtccagacttgatttttcgccattcgtcaaacttttcaccgtctgacaaagcagagtgcatgatagctacttgcttgccgaaacgtgaaataaaacgattggtcatttgtggtgtcaaagaaatttcaggcaccaagacaatggctgttttaccgagtttcaaaaccttgtcaatgatatgcagataaacttcagtttttcctgagcctgtcacaccttccagtaaaaacggcttactttcctgaccaatttggctagttacttgttcaacgacagccgcttgttcagcatttaaatcaagaaaatccgttgttgctacatcaaaataagcgtctgaacgttttttctctctttcaagaacagttatcaactggttatccacaaaaaatttgacaacatcacgtgaaaaaagatgatgcaaatctgataattttccttcttcaggatgctctaacaaataatcacgtaattccaatcgttttttggcacgattggagatgtctgcggcagctattttttcagcttgaacgtgataatatttttccgtcttgatatttttcttatctttagctaaataatcaacagtaatttttcctgcttgaaccaagcgagcgacttttttcgcttcttcctcggtcaatgacgaatgaagtcggctctctttctcgccaaacaatgccaaatgttcttcgctagataagctttctgtgggcgttaaacgtttatcatactgcgaattcagcaggttaggaatcatcgatttcagaatggaaattttataagaaaacaccgtatgacgcatctgctctgccaattctagctgttctgcattcaacacaggctcaaaatccaaaacttcgctaatagcttttaagtcagtcacagtattatcaaaagtatcagaaaaaccgacaacaaagccttgcaaaagccgattaccacgtccaaaaggcacatgaactcgtgagccgatggtcacttggtcttcaacatctttcggaatgatgtaagagaaaggtttatctgtttgcataagcgggacatcaacgatgacctgagcaatttttaccataaatttcctttctatctagtccttagctattcatgaaaaagaataatcatcatgatagcgaccaatgtttgtctagcttatcacaatgatttattacaagaaaaatctaagataaaacaccttagattttttctccttcttctttttctttagcgatttgttctttgattttacgttcttcttcttctttagctagacgttctgcttcgatacgagcaagaacagctgcgcgtttagcttctgggtctgggtgaatcacaacattaccagattcaatttcttcaagtgcttgcaaagttgcttttacagatttgaattcttgagttggtttagcacctgcttcaagttcgtgagcacgtttggcttgaagaatacaaagtgaatattttgaaggcactttatcaagcaaagtgtcgatagaaggttttaacatcatagcttttttctcttttctcttttttaatcaatatctttaatcatgtcgttatatcgtccgataacacgatcaacacggaaatgttctgcttcgataatgcgtttaacgcgttcagctgccaaaggcacttcatcgttaacaacagcataatcatactcacgcatcaaagcgatttcttctttagcacgttcaatacgttgacggataacttcttcgctatctgtaccacgtcctaccaaacgatcttttaattcgtccaaatcaggtggcgttaagaaaataaacaccccatctggaactttcttcttaacttgaagcgctccttgcacttcgatttcaaggaacacatcaatccctttatcaagagtttcattaacataagtcagtggtgtgccatagtagtttcctacgtattcagcatattccaacatttgaccatttttaataagctcctcaaattcttcacgagttcggaagaaataatcaacgccatcgacttctcctggccgtttttggcgtgttgtcatagaaacggaatattcaaatttatgatctggtgttgaaaaaatttcttggcgaactgttcccttaccaaccccagaaggtcctgagaaaacaattaacaaaccacgttcggtcatgccactctccttattatagactacaagttaagacttgctttttatcaattagactacagactagtgtatcaaaaatatagccatttttcaaggaattttaaaagcttccgtggctctttccgcataaaaaatgctgtttaaatcttagttagacattctacttaaattctagtaatttcagtgactgtttttagtaaataaatgtcgattaaaaaagaagcgctaagattagcacctcctttaaagattgttttattttgcatagtcaactgcacgaagttcacggataacggtaactttaatgttacctgggtaatcaagattaccttcaattttttcacgaactttgtgagctaagattgttacctcatcatcagaaactttagttggttgcaccatgatgcggatttcacgtcctgcttgcaaagcatagctattttgaacaccatcaaagcttgtggcaatttcttccaaatcacgaaggcgtttgatgtaattttccattgattcgttacgagcacctggacgagctgagctaagcgcatctgcagctgcaacaatcacagcgataacactttctggttctacatcaccgtggtgactagcaatggcattaacgacaatcggattttccttgtatttacgagcaagttccgttccgatttcaacatggcttccctcaacctcacggtcaacggctttccccatatcatgcaagaaacctgcacgacgagcaagcgtcacattttcaccaagttcccctgcgagaatacctgccatcttaccaacttcgacagaatgacgtaagacgttttgaccatatgatgttctaaattgcaggcgtcccataattttaatcaaatcagggtgcaagttaagggctccaatttcaaatgcagcagcctcaccatattcacgaatacggttatccatttccaaacgatttttttcaaccaattcctcgatccgagctgggtgaatacgtccgtcctgaatcaaagcttccaaagtcattcgagcgatttcacgacgaatcggatcaaatcctgaaagaacaacaacttcaggggtatcatcaatgataacgtcaattcctgtcaaactttcaagtgtgcggatattacgtccttcacgtccaatgatacgacctttcatgctatcgtctggtaagtgaactgttgtaatagtttgttcagtaacatattcacctgccatacgttgcatagcttgcgcgagaatatttttagcaagtttgctagatttatctcggacttcacgttcagcatctttgatacgagtagcaatttcgtgcgtcaaattagtttccgtttccgttaaaataatttcacgcgcttcagcaatcgtcatgagcgctacgcgttcaagttctgcttttttctgttcttctagttctccgatttgtttttcacgctcattaatgtgtctagatttatcggttagactttgttctttactatccaacactttttccttgctggttaggttttcatccttgcggtcaagagaagaagctcgttctgttaaacgagtttccatttgttttaactcttgcctttcagatttaaattctttttcaatctcttcacgatattttctagcctcttcttttgcctcgattagtaattctttacgatgtgatttactttctcgttcagctgtttttctgatgtgctcagcttctaactccgcttgaccacgtagattaacagcgtcttgttctgcatttaaaagagtgagttctgccgcttctttcgcagacttaagtctaactgaaatcagcacataaccaactatcaaaccaatgagggcaaaaacaatcaagataataatatttggcatgtttttacctcaataaaaattttagatttcatcaatagaaagctactttcaagtttatcataaaataagctttttcacaatttaaaattgtaaagcgttttactaaattttgtgttatgatatttacaaggaacaaaaaaggagtgtactatgtctaaaaaagaagttactgtggaaagttttgaacttgaccacactatcgttaaagccccttacgtccgccttatttcagaagaagctggacctctaggcgatgttatttcaaactttgatattcgtcttgtgcaacctaatgaaaatgctattccaacagctggtttacatactatcgaacacttgcttgctaaacttattcgtgaacgaattgacggaatgattgactgctctccgtttggttgccgtactggtttccatttgattatgtgggggaaacacaatacaactgaaatcgccaaagttatcaaatcaagtttagaagaaattgccaacgtaacatcatgggaagatgttccaggaacaaccattgaatcttgcggcaactataaagaccatagcctttttaccgctaaagaatgggcaaaattaatcttaaaagacggtatttcagacgacccatttgaacgtcatgtcatctaaatattaaagtcagcttagctggcttttttaataacaaaaggcaaagagaagcatttctccttgccttttatttatcgattaatggaactgcataccgccatcgacaatgattgtttgacctgtgatgtaatcagaatcaggtcctgctaaaaagctaacagcttttgcaacgtcttctggttctgacagacgttttaaagtgatgtcctttgcaaaagtttgcattccccattcatcatctttaccagcatttttaccgacttcatgcgcaatgtcaaacatcattggtgttttaacaattccaggtgcgtaagcatttaccgtaataccatctttagctaaatcacgtgctaaggtttgtgtgataccacgtaccgcaaatttactaccaccgtaaacagtcaagttaggattaccaacaacacctgcttgtgaagttgcattgataatcttaccaccgtgtcctaattttttgaactctgccaaagctgcttgggctccccaaatcgtacctccgacattaatggcaaaagtgcgttcaaacacttcttcggtaatcgtatccaaaggcgtcgttggagctacgccagcgttattaaccacaactgataaatctccaaagtgttcaacaacttttgcgaaagcttttgctacttcgtcacgttttgacacatctgcaaccacagccaaggcgtctgctggagaaatttgctgaacagccttttcagctgtttcttgattgtaatcaaggattcccaccttaaaaccatcttcatgcagacgttttgcaatagcaaagccaatcccttgacctgcacctgtaacaatagcgacttttaccataatatcaccccttatctttaagttaacttgattatagcgcttacaaaattttctgtcaattttttgaaacttttttcaatcatttttcattacttttatttatcaaataaaaagggagtgggacagaaatcggtaatttcaaagaaattcgatttcgtcgtcccaccccgcaaggttgagtagggttgtaaaagctgatttatcagcgcattagaacccactcaactactgcgccttgtaaataataactttataaataaagaagctgagtacttttgtctcagcctctttttcttaataatcaagtgcatccgaattaccagaagcattcccaacaaagtaacctgttttacagttaattgagaaaaggtatgttccgtcagccttgaacatattgtagtaaccatttccattaatgatattaactttttcaagaatgtaatcatttcctgagaagtaaccacgtgattgagatgttgccacaattttatcaagtacaccatccgcaaatgtccaagcagaattgcttgaatccgcaatcgctgaatcactataaggaacacggctcaagctacgttgaagtgtagaagcatcataagatgtgataccatatccactagctccagagacagtttgtgttgttgacgtatctgcactttctgtctggcttgatgtgcttgcgcttgcttcttgactacttgatgacgccaaagcagctaactgattcttaccatcggtaatcgctgattgcaacaatgtatctagattagcattgcctgtattcaaaaggtcacttgataaattatcaaagttagcatcagatttcacagttgctgaagctttttcaccatttacaataacatttgattcaaataaagcattgattgtttggatagctgtaatttgagctgtcaaagtatcgtattctttcttagcatcgtcatagtaatctgtgtcttttaagtcatctagtttttcttttaatgatgaaatattgtcaaattcactatttttcaattttgttttagtatcatctgtaaagaaagctgcataggcatcgtcaaatgctgtttttgcctttttagctgctgctgcagacgaactagatgatgttgatttcttagttgtagatgttgatgagctagcaacactcgtgcttgattctctggtataatttaaaccgtaagccacaccaaaaatagcgacaacaagagctgccaagccaccaataatcacacgtttatttttataagttggctgctcatctgccgtttcaagagcaatagcttcgctatttttgtcatcagcaactacagctgatgcagcttctggagttggctctgaaactgctgaatcagcatttggtatttcaatactaacattttcttgctgaatcgttgagtcgttttcagatgctacattttctgatactggtacttcttgcgaagtctcttgagtgtcctcaaccttttctgcttcaaaatcaacagctttaggcgtagcttcgttttctttcaaagcagactcaccaacaatcccgttgttaaccaattcctcgcgctgctttttaatgaaattgtccaaagctttggtatctaaatcgtcaaagtcagataatttagcctcaaacttttgcgatgtcacttcgtctcggtgctgtttaatgtatttatccaaaacaccgtcagactcagtcactccagcttttaattcagaatccttccgaacagcctccccaatggtcatattttttacatcttctaaattaagtccttcttgttcttcagaagacggcaattctttcttgtctgacacgcttgttcacctctctaaatcagattgtcatttttattaggctgtttaacgccgtattttacttttcttgcgctagcgtagtaactgaacgtttaacacgttcgccatagaattggtacaaatcaactcttagtgtaccgttgtacaatttacgttttttatcagcctgtgaaccatatttttgttcaaattgttcatcacttgttaggataaatttactccatgtttttagcggagaaaaagtctgtcccatttcattatacaagatgtccacagctttgtcatccagcaatcgttcaccataaggagggttagacacgataacaccattgattttatcggtttttaaatcttgaagtcgcatttgtttcaatttgatgacatctgcaagtcctgcttcctcagcattctttttcgcaatgtcaatcatgcgtccgtcaatatcaaatccagaaatatcaagttcaatgtcataattagccttttcctcagcttcatcacgaacttgttgaaccaaatcgtcgtcaacccaattccattcctcaaaagcaaagtcacgattaaagcctggcgcaatgttcatgccaatcatagccgcctcgatacagaaggttcccgaaccacatgttgggtcgataaaaggtttatctggataccagtttgacaactcaataattgctgctgccatattttccttaatcggagccccacctttttccacacggtaaccgcgtttgaaaagacttgctcctgttgtatcaatcataaccgttgctttatcttttaaaatggaaacttctattctaaattctgccccactttcttgcaacggaacaccttctggacgatgataaactttttgcagttttttaacaacagcttttttactaatagcttgaacacttggctcattatgtagtttagatttcacacattttgcctttgaaatcgggaacttagcaccaagtggtaaataattttcccaatctaatttgtaaacaccttgaaataactcctcaaaggtacgagccggaaattcaccgactacaattttaatacggtcagctgcgcgtaaccaaaggttagttgtcgcaatcgttctaacatctccttgaaaacggacttttccattttcgacttggcagtcaatgcctaaatcacggatttcacgccctacaactgcttcaagtcctgctgccgctgtcgctactaaattaaacgtttttttcattcattaattcctatttcatcaaatacttatctataagtttaacacgttttactggctttaagctagtaaaaatcaattaattttcaaacaccattattagccaatatctagtattaaaatacaaccaaaaataaaagctagcctaagctagctatatacctatatgcaattttctataagccatgttttgttccagagataactaggtcttatctccttcgataatcatctgtctactgtttccagtcaggatagattgttcggattccaactatcccatgcccctaccaaagtttgggttgctagcttgaggggtttaccgcgttccacttcttaggtttccctaagaactacgtcactgtggcactttcagggctattcagacatatccataaagaacttagcctttttgcccgccgtaacatcaaaaagatgtccctaggcttattgattcacctagcacaaacactaccggcatcacagccagtgctagcatggactttcctcatggtattaaaataccacgcgattatccaaaaattgcaatttataaactcactttgacaaatttccaaaataagttaaacacaaaatcaaaacagcttactaactgtcattagttaggctgtttattcagtgatttgttttccaaatacttctttttccaatcggctaatacgtttcaaaatatcaatatttgttgctgattgagcaacgcgtgtttgttgctctgcattaaccgtatgcgaaccaacataagatggtgttggcgccgcttttggttttgcagcgagttgttgttttaatttttcattttcagcacgtagttcttgaacctgtgaaatataactttcatagtccttgatgatgtcatcaagaaattcatctacttctttcttgtcataaccacgcatactggttttaaattcttgttcaaaaatgtccttaggactgtaaataatacttgccattctatctctccaaacaaaactattctagttaaaagtaagaatatgaaatcgtcatatcaagatatatgttacagaaaaattaatgaaaaatcaagcatttacctttatttcattattaaaattttattaccattcttctaagaattcattaagacggtcaaaggttagaaaattaatcggatagttctctttttcttgcatcacttgcaacaaatattttaaagttgtttcattttcggtgtcgtaaaaaagataagctccttctgtattatctactaaaaattgattatagtttttaaattgacttggattttcataacttttataggtatatttgacaaaatcaacctgcttaaattcacctaattttacttggttagcttcgttccaattttgaccatgattttcaaaagtaaaaatcgttgctatactaaactcatattcttcttgcaattctttggcaacttgcaaagcccaatattcaaaaccaagatttcccataaaaatcagccaatctataccttcttcaaaataacgaatcaaatcatggcggatagcttttttgataacactaatgcgctcatccttatcttgaaagattcctaattcaaaactcttatagcccgtcacgagaattgcagccatattctgtttcctttctaaaaatatgttataataagattgcttatattgacttaagcatgaatgttaggagttctatggttaattaccctcatcatcttattcgaaaacaagcagttcctgcttctaaaaaggtgaaaaaatcatccgttaactttgctaatcgtgggatgagttttgaggcagcaattaatgaaaccaataattattacctatctcgtaatattgctgtcattcataaaaaaccaacaccgattcaaattgttaaagttgattatccgaaaagaagccgtgccaaaattgtagaagcctactttcgacaagcttccacgaccgattattctggtgtctataaagggcgctatatcgactttgaagccaaagaaacgcggcaaaagacatctatgccattgaaaaatttccacgctcaccagattgagcacatggcaaatgttttaaaacaagacggcatctgctttgttctacttcatttttcgacacttaaggaaacttattttctacctgctagtgctctagtagatttttaccaaatcaatctcggcaccaaatccatgccacttgattatatcagaaaaaatggttatgtggtgacaacaagttcactacctcaagttccttatttagatattattgatcaaaaaattttaggcggtgatcacaattaaaaagaaaataacaagaaaacgaaaaaaaactaattctactacttcttcaagaaaagcaactgcacttaaagtcttaaaatacggcttgattgcaggactaacacttgtcattgcagctgttttggctggtggctctctctttgcttactatgtaagtagtgccccaaaattatctgaaagcaagttatcgtctactaattctagtttgatttacgattcaagtggcaatttgattgcggaccttggttctgaaaaacgtgaaagtgttacggctgataacattcctttgaatttggtaaatgccattacttctattgaagataaacgtttcttcaaacaccgtggtattgatgtctaccgtattcttggagctgcttttaacaacttcactagctcgagcacccaaggtggatccacacttgaccaacagctgattaaattggcatacttctcaacgagtgaatccgatcagaccttgaaacgtaaggcacaagaagcttggcttgctctccaaatggaacgcaaatatactaaggaagaaattttaacgttctacattaacaaagtctatatgggaaatggtaactacggtatgcttaccgctgctaaatcttactatggtaaagatttgaaagacttatccattgcccagcttgccttacttgcaggaattcctcaagctcctagtcaatatgacccttatactaatccagacgcagcacaaagtcgtcgtgataccgttttggcggaaatgtacgaggacggtaacattacaaaagacgaatacgatactgcggtagcaactcctgtcacagacggtttacaaaccctcacggagacatcaagttatgatgcttaccttgataattatattaaggaagttatcgaagaagtcagcgataagacaggtcaagatatttattcagcaggactcaaagtttatacaaacgttgatactgatgtccaacaatatctctggaatgtttacaatactgattattatgtctcttatccagattctgatcttcaagttgcctcaactatcattgatgtaacaaacggtaacgttattgctcaacttggctcacgtaaccaagacactactgtctcacttggtaccaaccaatctgttctgacagatagggactggggttctacaatgaaacctatcactgattacgctccagctattgaaaatggtatttacacaagtaccgcagccacgacaagcgatagtaaatattactggccaggcacctctactcagatttacaactgggaccgtcaatactatggtacaatgaccattcaaacggcgattcaacaatcgcgtaacgttcctgctgttaaggctcttgaagcagttggattagatgctgctaaagaattccttgaaggtctaggtatctattaccctcaactttactactcaaatgccatttcaagttctactagtgactctgatgaaaaatatggcgcaagtagtgaaaaaatggctgctgcctatgcggcatttgccaacggtggtatctattacgaacctcaatatattaataaaatcgagtttaatgatggtactactcaaacttacagttcttctggtacacgtgccatgaaagaaacaacagcatatatgatgacatcaatgctgaaaactgttttaacttacggtacaggtactgaagctgctatttctggtgtttaccaagctggtaagactggtacttctaactattctgatgatgaattagaagaaattgaagaatcaactggtatttacaacagcgttgttggtacaatggctccagatgaactctttgttggttacaccacacaatactcaatggcagtttggacaggttataaagacaggatgacgccaatttatggtgatggattgaatgtcgcagctgatgtttataaagcaatgcaaagctatctaaatgaaaaatatggtagcggtagcgaggactttaccgtaccaagtggtgtttatactagcggtagctatgtttacctaagtagttcaagtaataactacacttactcatcaacatcaagttctgtttacagtaatatctacggttcaagctcaagttcttctgaggaagaatcaacagctgaatcttccagcgaagatagttcttcaaccgaatcatcaaacgaagctgacaacaattcagataacagtaacacagaatctagtgatgaataacacaaaaacactctctgaatatttcagagagttttcttatatgcaaaatgacatcagccaaacagctgatgtcattctttttatttacttgcaagagctcccattggatcccatggtgcaaggacgattggttctgcttcataagctgcgcgttcttctgctgtcaaaaattctttacgtacaacgatttggtaagtaaattcatccatccaagcgtctgaagcgacaaagtaacctttgttaccaactttatctccccatgaattttcaactttccatttaagagatttgccattttcgtccaaatcaacacctgtaagcaccatagcgtgtgtcatcaaactttcgctgtaatcaagacgtcctgctttgtcttgagtgaaattgatgtccatagctgtttcaaaatcataaacatttgttgccatgatacctttttgacggtctgagatttgaccaacatcagaaccaaaccaaacagtttcaccagcttgcatttgagcgatagccaattctttgaaacgttccatatcaagattaaggtaacgaacatcacggctaccaaccacattaccaagcatttcaacagtgtaagatttgccgtaaggtttatcggctgttggcgcattgataactgatacgtattctgaaaggtctaaaccaacatattttttgaaaaattcttgtggtgtgatgtttttatctgaatggtaattgttatctttgtcacggtaagcaaagtcaatagtgcgtggtggcaaaccaagattgattgctaagaaattaaagacttcttggagaagggcttcttttttcgcttgaacagctttgtcatcagcaccagctgcaatagcttcacgcaaaatttgagcgtcttgacgcaataatttattaaggtattggttcaattcgcggctgttgcttgatgaaattgattctgggtatgctgcttttggtacgacaccgtatttttcaaaaagggcaacaaccatatcccattgtccaccgtcttgttgtggcacatcaagcaagaattttactttacggctaccgagttcttgatctgctgttgcgataacttgttctaagaaccagtttgatttttcgtatttatcccagaagaatgtgtgggcttgagacagctcaaaattttccaagttcaaatctgaaatcattttatgacggaaagtattgagagctgcaaacatccagcaacgacctgatgctttttggttggcaaccttatcttttgtcaaatcaattgaaaaagcgtgatcgttttccatttcactttgacgtgtttcaagtgattttaacaatccattgtgagttacagcattttcaacagcacgtaatttgctatcagcttgaaaatcagcaaataatttatcggtaaatgttgatgataattctgacataattcctcctatattgtcggttgatagtcatgtaatgttttctgacttaaccatacttaactaatatccattatatcgcttattaaggagattgcaagaatttttgataaaaaattctgacatttttaaaggaattacaagagtatgtaaccttttgtgacaactacaatttcacactactattttttaaagaaaaaagacccagcgggtcttttgttttatttccagaaatcgtcaaatactgtgattggtaagtgacgtttgtgttctgttttacgccaccaattttcaattttttctttggcttctgatgaaactgttttaccttcaaggtagtcatcaatatcattgtatgtgacacctaaggcaacttcatctgcgattcctgggcgattttcttccaagtcagctgttggaattttttcatagattgcaggatctgcaccgagttctgctaacaattgttttccttgacgtttgtttaaacgataaagaggaataatatcagcaccaccgtcaccaaatttagtgaagaagcctgtgatgttttcagcagcatggtcagtaccaataacagctccgctatttgctccagcaacggcatattgtgtaatcatgcgttgacgagctttgatatttcctttattgaaatctgaaacgtcaatgccagctttttcaagttcacgaacttgtccgtcaacaccttctttgatattaacgacaaggctaacatctggctggataaatttaagagcacgttgagcatcttcttcgtcagcttgaacgccatatggcagacgcacagcaataaatttgtagctatcatcgccagtttctgcacggagttcttctacggcgatttgcgccaaacgtcctgccaagcttgaatcttgtccaccagaaatccctaaaacataacttttaaggaaagaatgttttttcaaatagtctttaagaaaatcaactgatacgcgaatttcttctttagggtcaatacttggtttaacccctaattcggcaatgattttttcttgtaatgtcatttaacttctcctttttgttgtgcttctttgcggatacggtcgataaggtccattttgttttgccaaacttcttgtgacaagtcaactggataatcttgtggattaagcaggcgtttgtattcgtcccaaagtttgtcaaattctttacgagcatattcttgaatctcagaaagagatggcaagctataaactaatttccctttgtcaaaaatatcaacaagaagtggtacagcttcgaaatctttcactgttttattgatataagtatatgttgggtggaacatgtaaacttcgtcaagtttattaacatcagtgtctgtgaaagtgatgtagtcaccctctgttttatttctttcacgactagtaatgcgccacacttgttttttacctggtgtagagactttttcggcgttatttgacaacttaatcgtatcttgcataacaccattttcatcttccatagatacaatcttataaactgcaccaagtgctggttggtcgtaagctgtgattaattttgttccgacaccccagacatcaattttggctttttgcattttaaggttaagaatggtattttcatccaagtcatttgaagcgtaaatcttagcatttggatagcctgctgcgtctaactgtttacgaatttttttagacaaataagccatatctcctgagtcaatacgaacaccgaggaaattaatcttatcacctaattcattagcaacgcgaatagctgctggaacaccaagacgaagagtatcgtatgtatcaactaagaaaacacaatctttgtgagtgccagcataagccataaatgcttcgtaatcatcgccataagcttgaactaaagcgtgtgcgtgtgttcctgatactgggatgtcaaacattttaccagcacgaacatttgatgtggcattagcaccaccaataactgcagcacgtgttccccaaatagctgcgtccagttcttgtgcacgacgactaccgaattctagcaagggctcgtcatcaatgacagagcaaatacgagcagcttttgtcgcaatcaatgtttggaaattgacaatgttaagcaaggctgtttcaaccaattgacattgggcaagcggtccttcgacttgaacgattggttcattagcaaaaaccaagtcaccttctttagctgaacgaatggttaattccaatttgaagtctttcaaataagcaataaaatcagctggataacctaaatcttctagataagcaatgtctgtttctgtaaaatgaaggttttcaaggtattcaaccatacgttgcaaaccagcaaaaacagcatagccattggcgaatggttctttacggaaaaagatttcaaaaactgcattcttattgtgaatgccttgatcaaagtaaacttgcatcatattgatttgatacaaatctgtatggagagttaaactatcatcttgatacatgtggtatcccctttttaagaaatatgagccttgattagtcttgttaagaccttaccagcctcacaagattttttattatctccagctcaaagttaatttatcccccatattatagcacaataaataaaaccttgctacaatgccttttatcgcactcgtccccgccaattccccgccttaagctttacggacaaggctttttttattgcgttaaaaacacccgaaaaaattcgggtgcaattaaagtaaaataaatccttttgaaacaatgtgttcatacaccgtttattttactgaacatttttgccccaaatataaaaggtgtcagcatatcaccgacacctcttacaacgtatagttaatttgggaacagggtacgttgtaataagaagattattatacctaataattaggtacacacacattatatcacaaaattaagaaaaccatatggaattccatacggttttgccacaagtagaggttagtaagacaccaaccttggatcacatatccagcccccattatagcataaaattattacactgcaaatatctggcaaagtaaaaaggtcagcgtatgggtaacgccgacctatgggaagagaagaacttctaaccctcccacccttccatatcatgttcgtgtgttcagattatttattttttagtgtgcatctgaacagtgctcactgacgtaccccactcatacgtcactaatattatatcatatataatatacaaaaactccctcaaatcgagagagttccattattttaaaagggatatccttttaaatcacccatacacccttattttatcagatgtggataaaattgcaagtataaaaggtaccagatagactcttatacctttatccctcgtaaggctttaaaatgccgttgtggcttatcgccacgaatctactatatcataaatatccaaatgttaccacttgtttagcttagatgaaaagtcaattgtatacctgtaaccaacatttgaatgccaattgttgttaagattaaccccatcattttagtgatgatactcatgcccgattttcccaatgctgatgaaattcttttggcttctcttaaaataaagtaggtcaacaaacaaagaagtccaaaagctagtatggtcataacttgctttttaatatcaccatgcgaaagattaattgcagtcgctattgtccctggacctgctaataatggtaccgctaacggggatattgctacttccattggatcggatggttgactttccattccttttgcagagggagcatgtacaccgtttagcatatggtaaccaataatcgccactagaatcccaccagcaattctaagggaagaaagtgtaattccaaataaattgaaaatgaggtgacccgtcatgacaaaaaacgtaataaccacaaaagcaattaaaaggcttttagtagcaattttatgagagatacgatcattatcatctgccacaagagccatataggcagggagattagacaaagggttcataatagcaaaaaatgccataaacatgaatccgaattccttcatttgtagtttcctccttgtacatatattatgccactatttataacggtagccaacacttttacaaactttttgtttttgcggttataacggaaaataaaaaagctagcttgcgctagccctgcaaagaagttttgttgtgcttgttttaacgtgcgctcatcagcccactcattgccgtgtatgcttattataccataaacgtgcatgactgccaattttcctaacgtcgggaaaattaaaaaagccctagcttgtgctaggtcattttttaaaattctatccatgtaccaaaagcaatcataataattgaaatgataattgaccagaaatatacaggatatttttcttttatattatgtgagcatccatttttattacaacaagctttcatattgcgatcagtaagatgcgctgtagtattaaaagcaataaataaagcactgaaaagcagaaaagaagacgaacctacaaagataaatatttttcctaaaccagcctcgtttaagttttcgcctaactgacctaattgtgagacaccgccaaaaactgcaaagattatagatgcaaaaattcccaaaacagaaattatttcaacatttaaattactataatttctttttagttcgtgagcaactttttttaattttttatactcttcaatcgattcttgagtcacattatagagctcttgaacttcagtctctgtttttttgtataaattttgatattgtgtatatgctaattttgtatgttctaacactttgtaaaaagcatatatagcatcttcatactttgttttagcacttggagtaactttttcgccatcaaaaaaaccgtccatcacaaaatgattaacaattatttctaatgaatcatttgtagcttgaattaaaaaatcaaagctatcggatttttccattgtttcatctgtatggtcattgaattcattaactttactagtgatagtatcatatggaacacgagaaatttgttgttcatataaaaacttaattaaaacaataacctcttgcataaccaagttcgtgtccataacaaaatctatatcttcagatttaagcaaaaatgaatagtactgatttaaaaagttagtgaaattggtgttatccaagctcttttgaatgttattaagtttattagtcactataaattacctaattcatattcaatattggttctgaaaccaatagttggtttgttttctttccagaattctacttcatgactttgtctaactaaatcgaaaacatttttccctaaatagttcagtatatttttatttaacacagttaaagaatcgtcttcttcaaacacaccaataatcggtgatgaaccaaaatttctaaatctattatattgttcacgtactacaggaccatacgcccaaacttgaaatttttcgtcatacaattcttctaattgtggtccagtcaaagttcctttttcttttgcttctttcaaaacaaaatacattactttttgtaactgtaggtttgttatgttcatattatttttttgtgcaacagcgataatgtgatctgcaaattttttcatagacataacaaacacctccttttttagtacaaaaataacacaagtgtcacatctgtcacctgtgccaacgatgtaaatcatgaagatttacatatactattatacttatcttacattattattatatatcttgcaacattttttgtcattaattttgtagtaattttgatataaaatcaattaaatttactatgatttatatatgtttttactatggttttatataataacaaaaaacgcccccagcaaaagccgagagcgtaaaagtgtttgctattttattataccattaataaacagagccgtaagtgtcgccaccaacgattttagaaacgacatacactagttgctcatcttttatgaatgaaatccagtaatagccgtctgcctgtgctgaaccgacaatctcgacagattcgcctttcttgagaatgccgactttttcgccagtggcacttgctgacttgcgaatgttgaggttgacagtcgctacaaaagtttgcttttgagctacgtcgttacctttcaactgttctgcaaggtctgcatactcttctttgattgatttgagttgctcaacaatttcatcttgtttcaactgtttagcaatgttagttaattgtgttttgatgtcgtcaaatttagtgtatccgcctttagtgtcggtgtttaaacctgcgaataatcggcgataagctggcgcttttgttgagtaagtctctgtgcgcatatcttcgccgtatgacttcttgtaagcttcctgaacatatttcagctcttcgctgttgtgcatacctgtaacagcgtttgtagctgtgttgtacatgaatactgtacctttgccaaattcgccatcaccttccgttactgtaaataaaaatgaaccgtacataccagttttatgtcctttcttgattgtagatgtagtagctgtactttctttgtcaagtggcaatctgaaccaaccaataagcgtttgcttctcgatgtatgggttgtagttcatagtaccgtcagagtacagcaagcgctgcttttgacgtacccagccaccgttagttaaagcatcagagttaccgtccacattttgctctaacgtttgcggttgaccgccgttggttgtaaatatgcctgtgtgtccgtaagcatggctatacgtccgtgtgacccaaatatcgcccgcctgtggtgcgtttgaaccgttccaatagaaaacctcaaaaccgttcgcacgagctttagagagcaaatctatagcgtttgtgtacgccagattatactttccgccagtttcccattgggtcaagtggtcgacaaacgctacgcattgcccgccataaggattggtagagacggtgactttgcttcctgtcaatgacttagcatagtttaaaagctctgtgactgttgccatctaaatcaccccaaaacaatgtcgtcatcttctgtttgtacttctactactgttgtttgctgtacattacctttgacagctttcatgtcgtcaagatattgttgtgcttcttgtgcttctgtggtgaaattgttgttcttccacaaagtgtaaaagccagtaactgcaatataaacagcgttaacaagttgtgtgatttgttcattatcaaacttgataatgtcaatgccaaaagcagccaagaaataattgactactcctaacaagaacaagaccacacgcacccatgtgccagctgttacttttttcaaatcattaataatttttgtcatgataactcctccaatttattatcgattttatctactttttctgataaatttttaatttgttctgtcatttggataagcacttgcatttgcaagtcgtgattatccaatcgacgcttaatttcttctaactctttatcttgttgggtattcttttcttcaaggattgtcaatcgtttttcagttgaggtcatacgattttgaaaaaacgtgaaaattcctaaaaaagaaaggacacaagataagacaacactaactgtttctggtctccacatataaactcctaccctctaagcctattcagcggtatcttcgtcttgcaaacctacgtgtgataagtcaagtaattcttgtacttgtttgcggaaacgtttcggaacttgctcaatagtaatccagccgtattcaatttgtagtgcaaaataattaatcatcattgttcttcctcctaaaaatgtatttttaattttagttactagtttcatcttctgactcctcatcagaatacatttgactgattaaatcatttagtgtagcagtcgcaatctttgtcatcttttcagattcttcaattgctttctgcattttatcaatcatttcatcatatttagcgattttctcgccaatctcgttaaatcgctcgttttcggcacgatttggaaaattctcctgataaatggtctcaagcgctagctcttccagttctgtgttcgataaactgattttatcagctggtagcatgacgggaagaaaaccgccgtcattgttcgataagacgactcgtgttccgacaatcgaaccgtctagtccgatttcctgtgattttgagttaaaagatagtttcatgtattctcctttctaaaccataagcaatatttgcccgcggtattgttgattgtttttggaagctaaaatgttaaactgaccagtgccagcattgacctgtacgtgaccagtatcagcaccactgactgaccattccgcaatctcaatcatataagattgtggtgcgctaaatacacttggtggcacttcggcaaatacaaatgtgttcccgttgcctttaaaatcaaaacgaatcgctagcacgtcgccgcttcgtttatagtacgaaccagcataacctgctgattgccaaccagtgttgatttggttctttaattcatcacgcagcgcatagtatcgccaagcgccccaactaccacctttcttgacacgataagcggacactactccattgaaatcaatagcttcttgtaacacccacgaccctttatcgtgtttactaactttaatccacgtccaactatgtgtaccagaaccagttggtttattgactaaagcatcaccacgataaaatccagtttcaacgattgcattcaaatctgtaccattttttaaaaaagttgcttgaccgtcgtttaaggtcatttgatggtgttgaataggcttgttgttgtaataaaattcccatgcactatcaacgatattggctttctctggggttttaccgagtccaattctgtcagatctgattgctagagggaacttctctgtaccaacagttgctaagaactcatagcttgtaaacgcatcctctattttaccgatgatgtcgtaagtctttagtgtgctaaaggtagctgctaaattagcgctagagtttgttaaattatcaatagtcgtccacgtcccacctgcgctgcctgtatcagtcgtgtagtcagtagctgaatgctccttgcacttaaaagaaataatcattttgttcttttgctttccaccgactgttaaaggagctatcctagcatttcttgtaacagttacagtcgtgctagaagaaccgctacgttgcaatgtaaacgaaatttgtggagtgaaataattgataacagtagcttggacatcaactgcgtttgacgttcgccctctactatctgttactgttgcccgaatagtcaccgtaccgttaaagttcatcataccaagtagaccattgtttgaattcgtgctttgatttttgccaacaatttcagcacgataacttgaaatcgttgaaccataagcgccactagcgttgttgaatgttacttggatatttgacataacttgggcgaatgtattagctgtattcaacaagtttttaaccgttgcattactatctgtcagcgttatactgccaagcgttggcttaacattatctggtacgtttaaggttaaaatacaattagtttgaccaattttggtagaaccgctataagtctctaggacgatttgaccccaatcgctcgttttttggggcatagctgtcgcaagatttagcggtggtgtccaactaacagacgcaccaacaccagttgcaattgtgccagacaatgacccaaactcgtatttaaggttgtgagtaaaactactgtttttacgattgatattgagtgtcattgcattcccaagcgtacctgtaacattactgattgtgcttgctctggcgatagttggcagcggaatggataagttaacagtagctgaaccataaccgcctacattgatgtcaaccttaaaactaatagtaaccgttttattcccattgccgtcatggttaacgacgtaatctttggcaaaaataagcagagatgaattcgtgccaatgttaacaccagcattaacaatttcattgccgccatcgacatgaattgtcattggtgcagtgacaccggttacagaggcatatccgttggtacgcaagcgagcttgtagattgaccgttgacctgttattaactgtatcttgtctgttccatgccgaccaaacttctaatgtcatattgtgtccgtattgaccgctaaatgtagcagttgccatatcaacctcctaaataccttaataccagcatgtctgcatcagctgggtgtgtttcaaagcgaaaacgaccaatttgaattgttttcgtaaaaataccgttagcgatatttaacgtaccttgcgaaatgtacatcacttcgctacttccggaaaacagactaatcctgtcatcactaaattttgcataagctgaaccatctttcttaccaataaccagaccttcgttttgaaagctcatgaatctatcgattgcttcccaaacaagctttaagtcgttaacctcgtatttcatttgaacgattcgctctgacgcttcttttaaagcttgctctgatttagctttgtctgcatcattagctttgacatagttctcgtaagctgttatccatttatcaacggtatcaatactagcttttgcttccatttcagctttgataagattgtcctgctctgccaacgcattcaattgctcttgcgtgagtgcgctgtcggctttgctgtcgatttgttcttgggtgtcttcgatagcttgaatataatctggatagtaagaaccgattgacaacatcatattttcaagaatgattttaaagccgctaggaaagccataattcgttccaaaacgtataaacacattatctgtgtggtaatcctcgctcgcacttgataaatcaattccaaattcaaaatgctgtctgcttgtcgtacccgctttgaatgtaactctatttgagtaccaaggagttgccgagaaatgaatattagctatgtagtcgttttccagtgcaacaggaaaagtaatatcgaatgatatttttacaaaattctttttaaacctgtctttgtttttccaaaaggcatcaactatgtatgttctccagtcaaacgtctgcgcatccgttgtatagaaagttttagttaaagagtttttaaaatagttacgagaaccccctttaacattcgccaacctatccacccaagtatatttcttgtaatcggtgctattagcttctgtgtagtcgctgtagtagcccatatattgctgattcttgtcggtaaaactaaggttagtacctttgttgtcgtcagcataagcaaagtgaatgtaaggtgttttgccgtcagttcccggttttccgggcaatccttggtcacctttccacttagaccacttgtatttggtcgggtcattgctgttggcagcattaaaatcttggtacatgccccaatatggtttggtgttatctgttaggctaaaaccaccaccggttgcgttgtcggcatacgcaatatgtgtgtactgcgttttaccgtctgcacctttatcgccttgaattccttggtcgcctttcggtccttgcaagccttggataccttgcggaccacgctcgccagtatcgcctttgtctccttttggtccttgtggtccagtagctcctttatcacctttagcaccatcagcgccatcattgacattgattacatcgatttcagtagttgctacttcgtcatttccaatgtacgccgctactgtcaaaactgattgctctgtgacttctgcacctttaacggtgtatgtcatgccagttgtgacgtttccgtctaaagaccatcgccatgtcacatcggaagtgataggcttgtctgctttaaacagacttggtgttataatcgtttcgccttgtccatttttaaagataagactattatttcttgctaatttaattgtgtaaggcgtgttagcttcgactagctctgccaaacgtttctgcaaagttgctgaaacagtattcttgagcttgacatagttcgaaaacacaagtgaattgttatttggattatcgaaactgataatttgttctgtcacacgagcttccagcgcaagaccacctacaaaatttccgtcgtaaattttaacggtatcaccaagcgccaaatcactgtaattgcctaaaaagctggattgaacacttgctgtgtacgtgataatcggataagcgtattgtttcattgtacgaaacgcataagctgttaaatcgttaacgtctgtatattccgtttgaaagtcttttctcgtccagttatcaccgtctcgcaacgttgacgggtacatttcagctgaaagcggagcatatacagcttcgtttcccttgcgggtataaaattcttccttcccgtcttcgttcttgtctgaacgttcgacatctttcatagaaagtccgtcttgacctgtaaagaccgccatgttaaatagctgtgtcttatcagtcgtaacttgtacacccttaacgtcattgccatagtaaagcaagacgtcgcttctcaccttacccacgccgtggtgcgtgctatctggtgattgataaatgttcaaagtgatttgctttaacgtaccgttgttatttagctctgttacgaactcatattctgcgtcaaattgtgacatcaacgattgcaaacgtgccaacttcgtttcttgcgaatcaaaagtaagcgtgcgtttgcggtctgaaatctcgtttatgccaatttttaacgacgtgaaagctagcaaatccatgtgttccaaataccatgcgagcgtttgtgcgctgtcgctactgaacgcattggcttgctcattattaagctctaagttcgtatcgttacaagttagctgaatactgaaatcatcttcaaccatatttgcgacgtaaaacacataatttttgccctgattacgaaaagaaaaataagctctatcattgataaagcttaaatcttcgtgtagttttccgctgtatagtttaggaatggtgaaatcaaaggtgttcgttgcttgtggtagatacctatgccacgtactattgtaaaacgatagcatgcgaggtatagcgttgtttattgctgttaccttgcgcattcttgtatcatgaacccaaatttgcattaaacatacctctcattccaactaatttctatgcttggctctttctcattccagcttgacaagtaaatatcaagctcactttcaccgactggaattccaaacggctcggaaatacttgtacattcatcaataatgttgataccgtttcttgtcggcttacctgttgccatatccatttcatagattgaacccatgccaaaacgatttggaacatcttccagataatcaacatagttcttttgataaagcaattcgtcaaggtacatgtgtgttaccaacggcttatcttgcaaagcaccaaagataacatgtatcttgtttgatttcttgcctttcaaagctgggacttgtcgtttgatacgtgaaccccaccaataaaagtgaatgaaatcatcatcacggacaatgtcagaccagccacgagtactattgaatggattgtgtgcatctaaatgcgttcctatgaactttcggctttcgataacttgatagccaccatttccatcagtaaccatcatattgtattcacattcaagacctgcatgccgtttcatactttcaacgccgtacaagaatttatcagacgtatctgtcacaatgattttcaaaaagccatactgtttagcaagaccaagccaaaaaacttgacgccaccaaatatagtcatgtaatgaccctttgtttccttgcgaatccgctggaatatcaaaggtcaaaccaccgtactgcgagctaccaccgttggcgattgtgcttcgctcatccatgaaaacgtgatagcgcccccaaacactctgtgtattgagtatggcagtctgcgtgttttcgctactgtcgttactgatagctttgttctttgtagcgtttgaaaagccacttagaatgccagaattgccattatacaaaataagcgtttctgacttttgcgctggtttcttgtcgatttcttctgggtcgccaacttcataagttccatttgaactaacaacaccaatccaaccattatcgccattgtgcttaattttgattttaggataagcggttgctgtccccaaatttttaagcttagctttataatgggtgttatcaatcttcgtgattgagccataagcgctgtcgttagttgtatcaactaatgccgctaccttgttttcagcatatgcctttggcacatcaaacgtaatcgttagtgtagccgttggcggtgacgtgctattgtctgctgtgattgttggttgaccgcttggcaatgcttcccacgctttgtttggctcatcaccgaaaatcaattcttttgcttccgtcacattcaaaaagcccccgagcttctcggagacttgattaaaatatgcggaagttccagtcaatttaattgtgattgtgatttgcttaacagaaagcgtattgtacagaaattgttgcccgtatcggtgattcccttggtcttgataggtattgttgaatgttgacgctatattcctgttaacgtcagtaacgactgcatttccaccaagcccattaaaggctgaaatcaattcatcattaccatatttaacacttataccaatcaaataatttcaccccctagaagcgcttgcctgcgctcataatttgtatttgccgttgacatgtaaggcgctaaaccgttagctactccttgtccgtcaataatattgcggatttctattggattagcaccgtttgctacaagttgagaaagcaagttgattactgtatcgaacttagcttccagcttagcaaatgatgattcactgcttccacttgtgctatggtcttgtggtgcttctcctgcaaatcgacttactgcttcactcagcaattgccaagctctgccgcgttttgcaatgtctgtcggtattacatactctggcatatcgccctctgcgagctcgtacacgccatttttagaaactagtccaccatttgcatagccatagcttgcaactcgtgtaaaggctgcgtctgacgtgccgtaacggttcttcatgtagttaattgctgcaagcaagttatcatagccgttgtaaatgtcgttatgacctgcaaacttgtaagcattgaacgtgctatcaatagtctgcgcaagtcccttagacggatgacctgcttttgcattgctgtcccacaagttaatagctcgtgggtcgccgtttgattcacgctgaatcaatttcatccaactgttgacttggtgcgctgttgcttgcaatccgttggctttcaatgcttttatgacgtactcacgccagcgttcaacatttccgccttgaggattatcaaggcttccgccgccttctccatttaatggagctaagattttagaaatccaatcaaacataccaccgacttggctcttaataagtttgcgaagcggtgaattttcttctttggctttatctgcaacttgaacaccaaaatcaagaaatgtgtcaacttgtgaaattggacggttagcaaaagcatgataagcgtgactacctgcgtagttatactcctcaccactaaacgaactaccagatacgccagaaacggttgaaacgtggttttgaccgttcttcgcataaacggcaatcataccaggttttggtgtgctactgtgtggaactcgtgcattaagccacatattaccgttaccaagaccgctaaataggctggcgttaacaccttgattgctcaaacgagacgcaacgaacgaaacacattccttgaagaagtaaccccaagggtctgctccgctatctgccactctgtctttgaattggtagtcatcaccaatagcaccagcttgaatctctggcgaagccttctctttagccatagaccaaagttcagaccaccaacttttagctgtttcaattggtttcttgtaaagtgcattaccaagcgaactaaagacaccatctaatttatcagcatttgggctgaatttcttagcgagtgtgcctgctgggtctgtgactgcgtcggtgataaagcttaacattttagtaaacttatccactccgtcttttagaccgttccaagctgaacttgcgacgcttgtggctgtgttccagattttagaccagaagccagttcctttagcaaacgcttgacgattgtttagacctgcaagcatagccaattcgctagcatttagcacctctgaacctgccggaagaagcatttgggcatttctgccttgtggtaaaactgctttaccgtttggcaaaataaccatttcttggttattcgtctctgggctgtcattaccgtcatttagtgtagcaagcgttggtctagtgattgggttacgataaccgctgttaaagtaaccagtaccagtcgcaaatttaactttaggaatcttcttaatagattctttcggaccgccaaaatcgtgaatcaagtcattaatgccgtcaataccgctattcggtatcttgataactgcattaataccgtcaccggctaattgtttgagtccatcccacatcttaccaaagccgtctttgataccgttccaaatttcttggaatttatttccaattttatctaagttatcaaagagaagccccttgaagtcctttccgaatttcttcttggattcgtcgttaatttcatcccacttgttagaaagataattctttgatttcttccaagttttagaccatttgtcatgaatttcatcgtgtttctctctgatagtcttagctagcttctctgtgctttctttagcattgtctttaatgccgttccaagtttttgaagctttttctttggtcttatcccaatgcttatcccagcttttcttgatttctttggtttttttggaaataccgtctttgaggtcacctaccaaatttacaatacctttaacgaatttgcggaattttgcactttctttgtacatcaaagcaaaacctaaaacaactggattagcaaagattaggattttgccgatagtggtagcaacatttttaatggttttaccaacacttgtaaagaaattacctactttcttagcgccgtttttgatacttttaacaacattgtctgttccgtctgaaattgactttttgaacttcttccagcctttagacatgctgtcgaacttatctttaagccatttgataccgccacctataccgtctttaactgatttagcgattccgtcacaaaagtcgcgaaacttcttgttgtgcttatagagttcaacaaaacctgctattatagtcgttatagcgatagcaatagctaaataaggattagccattgctgcggtcttaattgcgtttaaacttgtaacaatattgcctgacatagttttaatagctgttccagctgcgttaaatccagccacaactttcgtgcttataaaataagttgcaaacattgcgccaatagctttgattgctcctttgtgcttcgctattccttggatagctttagatagtgaagagattgggtctttggcgttcttactatgtttagaaatttccgagaatgcatcagagatgcctttaagagaatctgaaacaacatcccaaacaccttgaccaaaaaggccagctatttccgtaatacttgaaacgatttggacaatgtctccagtatgattgtagatatacataaagagtttatctgataaatcagtaatcttagaaagtccactcttaaatgtattcatcggagactcagaatctttcagattcttttttatgctttcaaagccattagatacacctgcgactgtatcagcagcaatttgccaaactgaaccacttaaatttaatgcgacagttccaatatttcctacgacatctccaataacatctttgttttgtttaaaggcatcgaatatttcactaaaaacagcttttgttgtattgaaaaatcttccggctggtcccatagtaataacagtgatgttatcattcatccaagacacaccgtctgctactttttcaaacgccttacctgcaatgtcgccgaattttgtaatagcacccgttatattctctttgccaaaagcgtcaacaatattcgtcattccagttgtaatcgttgcttccaaattaccgattgccccttcgaatgttttagttgaacgtgccgcttcttctgctgcgtcacttgaccctaactcttgaatagctttcagaaattcttctgccgaaatttcaccttttgacattgcgtctcggaagtcaccagtatacgcaccggcattttttaaagcttcttgtagcttaccagaagcacccggaatagcgtcagccatttgattccagttttctgtcgtgagtttaccagctcctgcagtctgtgttagtaccataccaacagatttaaaggtgtctgcgttaccgcccgccacggcgttaaggttacctgctgcaatcgcaagttctttataactatcgatgccgttagcggctagctgtgcacccgtatttgtaatatcttctagttcataaactgtgtcatctgcatactttttaaagattttagtagcttcttcggtttcttctttagttttaccagcgaaccccattgttgattggaatttttgaatagcgtcagatgtattcgtgacttccccaatcataccagttagagagctgatgacaccttgaatagcattttgtgccatgcccgctactgctccaaatgatagcttttcacggaaagaacctaaaacagagtttgtgcgctctgctttttctgtaagtgattgcatttcattcgcagattctctagcttttgcctttaatttttcaaaaaatgtcggattgctttttctgagctcgtcgtcaagtttttcttgctcactcttaacttttgcaagggctgttgctgtctcgttaatacgctgcttttgtttaacataagcgttcccattaccttgcgcagaaatcttacgcaacatatcaacctgcgcttcatattgcttgttaaggttaattaccgacgactttaaaagttttagcttctcttgttttgcttcttcttccttgccctcggcttccaaacgtttgatataactttcagataaactattttgctgtttatactctttttgcaaatcagccaaaccagatttgtagttatttacgtttgttttagcattagctaaacttgtggcggtttcatctaagcgtttcttttgaactcgatactcgtcactagcttctccagattgagcagcaacctttttaagcatattttcttgagcttcatattgcttattaagattatcaactgaattttttagcagttttaatttttcttgtttcgcttcactctctttaccttccgcttgtaggcgcttgatgtaggtttcggacgaatctatttgttgcttatattctttctgcaaatctgctaagccggatttataataatccatgcttgacttagccttttgttgctgcgcttccataaaagctagtttagttgtggcttggtcgatttgttgttggtattttaggtattgttcagctgtttcagctgtattacctttcaattcagactgttctttttgaagcttttcaattttagcctgttgttgttgaatggcattgcctaagccatcgtatttggcttgtgctgcacctaaataatctccagttgcccgcatttggctttcttgggctttccaagcgtttgtagcactgttgactaactgtgtgattcgtttgatagaatctgacgcttgcaacatatcaagagcaatttcagtcgacatcgtagcttgtattttcgccatgttttatttcctcctttccacaaagattaaagaagcgacatcggatcaactgccctatcatctgcttcttttgcatttaaaatagccattagctcgtaataatcggtatcgttgtattcttccactgtccatccgaaattaataagggcttgtttagcaataagttttaaatcttcaattctattctctaaatcaaaaatttgctcacttacgctttttcttttgggtcttctgtcaccgttgcttcttctaattgctcatctgtaagaccgtacatgtaaccgactaatttttcggaaatttcttgtgtacgtgtatagtcaaggtcaagcaatttgtcgtagctttcatcatcaagattgagaatagctcgaataaagctaagcatttctcttaaaacttcataactagctttagcttgagctagtgtatcttcttcgttgacgtcgtcaccgagttttaaaacagcaagttggtattcgtgcatacgcataacgttgcggttacttgttaatactgaataagcttttttacttaattctgggattttaattgttttaacttccatgatttctccttacataaaacaaaaaggtcgcatttaaaatgcaaccttaaaaattagtgagattctgacacgctagctgcatagccgccgaaaacttccttgagcatgttagctttatcaaacgattctgcgccagagtaatatttcttgattggttcaccgccaaatgctgtagcagacaaagcgttgtaagtcatgttatcatcttgacgtgtttgtgctgtgtctgtatcagtagcaacgttttgagtggtttcttgcatgataccatttgcaaagccgaaataaattgaatgtttgcggtcaagtgtttctgattcaataagcattgcaacgtgtggtttatctccagaaagtgtatacccacctttttggtctgatacgaaacctaaaactttttgtttgatttcaaaatcaaggttgttgaaatcaagagcgactgctggcgaaccgggcgcaatcataacatcttgtactgcgttgttcccagaaactttagtagctgaaccctccaagtttgaaatgttcgcagtcttagtaccgagcatagaactatcaatttcaacaattcctgtagttgatagtccttgttctccttttagaagctgttgtgtttttggatctactaatgctagtgtcaccatttttaaaccgacaattgccatattatttctcctttgaattaaattattttttcatgagcaacataaaagaccgccgtcatctgtaacgtgtcggggtctagtgtgtgctctctaacatctgttattgtgtaatgttctgaaacaagaaatttcatcaatcttgtttcgaattcttctaaatcaaaatcaacgtctaatttataaaaaatctggacttcgatttgattcgttttgccgaaaaagctatcattgccaaacatatcaagaaaagtgcctgattctcttagcaacataattgtcttatcagtattttcttgaatttcttttggtaggttgttcacatatatttcgcttatttcactgaattctttaccagaaatcaattcttttaatgttaatgttgctaacattatttagcccctttcttccgcataattttgtcatattcctctttttcagctaacaacacctttctttgaacagcgctgtcattctgcacctttgttacaaagtggtctgcacgatattttttagttccgtcgttcaaacgcctagcattttgagcatgaaaacgattctcccaaccaacagttgatttaccgttttttctgccatcaacactagttgattgaacagatacgctatcagccatatgtccataaactgggtctttatgatttgaatagtgctcttttttggtggctttcgccaattcgtctttaaagacttctgcccctgctttcgtgattttagattgttctgcaggagttaaattcccaatattttgaactgttttaagccattcctctaaagcgtcatcaaatccaaccattattttttacccactttttctgatttctttaatgtaataaaatcgtatttattaataccgaatccctcatctggactaacttttgtaatatcgtaaacattcccattcaaaagaacggcgagaccttttataacttttgcattatgtcttacaacaattaccctcgtttcactttcgccagcggaaaccgctaaatattcttgattcagcgtgcgtgtatgtgatttatagtgtagagtaaattttttaacaaatttaggcacgctaactcctgtataaggatttgatacagattcatagctaccaaaatcagctttttctctaaaatccacagcagaatatatttttgccattagcttttctcctcttcatacactgcatataagccacgcaattggctgacaatgctgtttaaagttaaatcaatagggtaagttgtagtatctgataaagccactctatatgtgtaatacgagcttgccaatgcaagtaccgctgtatcatatagataggtaacgttttcttgctcaaaaaaaccgtcagcgtcaccaacggcatttttgacaaaaaattcagcagatgaaatgtaagcaggaattaaattagtatcgtctgcttcgtctaaatttagtgctaacataacatcatttttggtgacgcccattgtttactcctccttaattaaccagcagcagttgttttaatattaccttcctgatctgcaattgctgtaaatgttgcaggaacgaaagcttcattatcaactgtacgaacatcaaaacggtcaatgacacgaattttagtagtgtctgtttcgaaagcacccgctccgatatttgtagcaagcaatgacatattttcacggtcgaacaaagtaactgcttgtttcaaatcaccaaagtaaagtggatgtgctttagatttatcaggcaaccagcggtcaccaacttctttaactgggaaaccatcaataacatagcctgttggtgatttaacatcacgttgcattaggtaattccccattgcatctttgacttttttaagcgctgtgaaaccagatgtattagtcaagaacattgaagttgatttgatggctgggtcaacttttgcttcaaggtcgataatatcatcccatttagcaagtgttggcttagttggcaatgtatcaattgctgcaatgattttagtgttgcgagtaacaaccactttcttggcaatccagttagataaccaagcgataatattttcggcagtatctttcaaaagcgagttagtgattgtagaaataccagcataacgtttgataaggtatttaattgttgtcaattgtggatcatcattagcgccaattgttgcaccttcttcgtcaatttcagcaagtgctgtaatatcagaccatttttcataaacacgagagccagaagttgttgtaacagattctacgttgacgtattcttgcaaagaatcgtattgacgcactaaagtgttgattgttgtttgaatatcttttggaatagtcaaaccagcatgtcctgcgccatctgtttcatcagatgaaaccatgtttttaatttgtgcgtaattaccacgaactaaatttttaaaatcattaataaattggtctttgatttccaattcttcatcgttaagtggtgtctttggtgtttcaatgacagtttgcgcttgcgcttcaaccaattgctctttcaatgcatcacggcgaaccttagcgttatcacgtttatctttcaaatctgcaaaagcttccgctgaaaaattatcatcattcaaagcattgttaatctgttcgttaaggtcttctactgtatgacctgcttcaatccaaagattgttaagtgtgttaatatccattaattttctccttttttgtccaataaaatagccaacttacgttctcgtacagagtttgtaggctgacttgattgtttattcaatttttctttagcaatcaaattcttgaatttattgattgctgctttgcttggcaaagcatgaatggcattttcaaagattggctcatcatcggattcattgaacatgatttcgtccgcaaagcctttgtcaactgcaactttagcattcatccaagtttcatttgacataagttgtaaaatatctgtctgtttcatgcctgttttaagctcgtaagccatagcgattgattcatcaatgccgtttaggacttctgattcgtgttctaaatcgtcactgtttccgactgtagaaaccgaagctttatgaatcataagttgacttgtcggtgacattcgaacagtatttccagacatcgcaatgacactagcagcactagcggctagtccttgaatgttgactgtgacatttttcccgctatcacgaagcatggtgtaaatttcagacgctgcgaacacgtcaccgccatttgaagcaatgtctaaaacgatttcgttatcttcatcattcaagatagcttgttggattttcttaggatatgtactagacattccaaaccattcataaaattcaccgacatcattagagacaatgtcgcctttaatatcaatctttcccatctccctcaccccctttcaatgttttagcggtattaggattctcgtttactggcaattcttttggaattacttctgcttgttgcaacatatataacccctgattttgagcaacaacaccattcttgactagttcatttactcgattaatatagcttgaacctgtcgggtcaacggctgggaataaatcagaatcaatgtcacaacctagcttattgctcaactcgctaacgaatggtcttaaatacctcgctactgctttagcatagacattcattgacatatccaaagaagattgctggtcgcctttaccgcccacagcgttctctggaatgccataaacctttgcaaattgccctgttgtccaatctgcttggctaagtaattgagccacgtttgatttgatttctaaaggttgaaactcctctaaactatccaacactagaggaccgccttgcatttgcttcatcgcttggcgtgagcgtgattgcttggttttaaagtccagtaaaccaccatttttgatttttaaaattccgttagcgttcaaggcattcttaagcgaattaagcgttaaattatcgctagctttctgaatattcagctctctagtcagcgccataagcggactaacgctggtcttgccaccgtcaacagaaagcaaacggaaatgtagaacatcattttgaggaacattcatcttagctccgatttttgggtcgtcaaacgtgatgttgtaatacaatccatgctcataatcaattggattcatactaatctgtgacggtctcaaaaattcccatttaacatcccgtccgttttcgtttcgccagcgataagcgaacgcttcgccacccaaaagcatttgagcaaagattgactgataaaacccaaagcgatttgaattattcgttggattatcaataattccctgcatacgtttgttagccgtcaatttaaccgttgctaaatcatttgaaagctggttaataatagaaaataaatcagagttctttaacgctgatttggctgacacccattcgttgcctgtcaaattagctgttaaatagttgtaatcatcttcgttaaagaattgtgtatttggcgggctttcggttgattgattcgtaaaattaaaaactggcaaatagtctcaccccctttctaccattatttttctccttttccagaaatcagttcgctagctaaaccagctaaaatgaatgtaattgtcatgctaataccaaaagcaatgtgttgctgataataagtcgttaaattagcagaaatcaccgctaaaatgaacataatgacgtcaaaaacactccaaattgctttaaaaaactttgaaatcattgttattttttacctctaatagtcatctaacatgccactttctgggtttttaagccaatctaaaaccgcctcttgtgacatatgctctactttccatgttgggctattggtgattgcgtaatcttcaaaggcatacatagcgtcatacataccatcgataattgcatccaccacgtcaattttgtaagtagatttcatcttgtctacttgaatgcctatgttgtcttctttaataacagcatttatcaaggctttacgcatgatttcatcatcgattcgcgtaatgttgccttcaataaacaaggtttgtaaaaacttggtagggtctttcaattcgcttgtacgttgcctaattggcattaaaggaaagcttgtgttagcttctaacgctttgataatcttagacacacccattgcgtcgtaaccaaaaaagacaacgtcaagtgcgttgtcttcaacataatctaaaaaccagcgataaacttcctctggattgataagcccttgtggatggcttgtgatggtacagtagcctttctgttctaaatcacgataattgacgccgtcctgctccattttagcttcaagcgagcctgcttgttgccaaggaatgaagctgtgctgttctacgtgccacttttgactgctatcttcgcccaaatatgggtaaacaaaaccaatcgccgtattatcgctaaacattgaagcgtcaagaccaacatagacacgtttaccacgtatatcaaattcgggaataaccgcattttcaatgtctttcaaatcaagaaagctattgctgtcagcaagtaaccagcagttcatgtttttaacttggaaatcggcaagcttgcccataagcattttcttgtcacgttcagaaagtaaacctttcataaggctgtcttttaattctgggtgattcaaaagcggattgcttttagcccacgtttctggttcaaacgtttcttccaaattatcctgtgaccaaatcaagcagagctggtcgtctcctgctctgtcgtaatcacgttccataatttcaataagtttcttttgctcttggtgaaatggaacgtctggcgtttgataagatgttgaaatttcaataaatcgtgaaccctctgtgttgacttgcccagaagtgattttagatattccctcatcacttctaagctcaccgacttcatcagcgacagccagtttaaagtgcttactatcgaacttaccagattcgaaagaaatagtctgaatgctgttgctatcaactgtcgctttgatttctcgtgtgtacaattgcaagccagtttcttttgctaacgacttaaaaggctcattctcgataattcgtgacatcatagacttaacgtacgtgtagagcttcattgtttgctcgaagtttaaagaactaacaaggaaatcttggttgctaagtccaatcgtttcgattagaaacgaatagttaagactaatgcctgctatcattgttttaccttgcgcacgagccattgaaagaatgatgttgacatatcgtggtaagccgtctaaatcaaaccaagcaaatatttgactaaagataaataactgccaatccattggttctaacttcttgctcaaatcatcaacgtttggtactaacgataagaacttcaagaagcggttaaaagcgtcaatagaatagacataaggaaaatcatcttgcccttgtctttgtaagtctctaaggtggcgaaagcatgccaatttgatattgtaaccagctactatcttgctgtctagcacattaaaacaatattgtgtgccagcgtctgtgtattttttgcggacaaaagaaaaatcgatactttgataagcaccgattacatcttttgtttttgttaaatcaattttgactatgtttcctcacctctttctatttgaaaaaatctttcatcttgtctttgatagaatcctcatccgacttctcgcctgcgatttccataagctcttgacgccctttaggagttaaaccaagttgaacaccgattctgtttaaagtatccacagcgtctttcattgtggcgactgctggattctttttaaaaccaagcgactgctcaccgagaatttcaccagacccttgagcttgaatcggcttcttcatttcctgttgaatcccattttgtttaatatcctcgtacgctattttgtaaatttcataattcgtacagtaggtttcaaccaagaacgtatcaatgcgctctatcttttgtgtgctttctaaaaacggaacgattttgcgccaaatctccctcgctactgttcctaagtagtttggtgggtcaccgggtaaacgcttgttattttgctgatagtatggattcttaaccactcattgtttctcctctcgattcgaatcatgacaccccttaaaaatctgaaaaattggtctgcgatacaagagaacaccttgtggtggctctccttggcacgagatagggggcgggggttgatttaaaattagtccaaatataattacattcccaaacattaaaacaacactacgggctttttaaggggcttttcgaacgtctttcttttttgcgggctattaatttagcccattgcgccaccgaaagtcttaaatccacatttttgtgcgtgtttccttgacctgtcccgtatatttcttgctctaactttcgctttacgttgtcgcaatctctgcacgctgtcgctatgtttgatagttctgtgcgtatttctggagctatttcagctggcgttatgtggtcgccaaccttggcattaggtcgtttgacacctaaagctaaacagtattgacacatataattatcacgttctagagcttgcttgcgaagcggtgtccatgttgatgaatgataaaacttattacgttctctattcgcttcatctctgttacgaactcgcttgttgtaatatgtacgactgtacgtctcacgttgcttggcgtaatctgcttcatattgcttatgcctgatgcaataatacgagggtctttctactaatgtgtggcaccctgcgtacttgcatctacgaaccattggcaaccttatcacccctttccttacacaacaaaaggcaatagctattgctactgccttatccttatcattcgatactactataatagcactttaaaagttacctgcacttacaatcgctcacattcaatcacactttataacatacagtaacattttgttaccttgtgttactttttgttaccctacctattttatgacctcagtaataatgaggtcacgtaataaaaaagaggactgatataatcaatcctctaaaagcttttctgccttgcgcaaccagacatagtatgttttacgtgtgattccgtcatagcgctcgcaaatatcatcaatagtcaactgttcaatataaaccatttgcaaaaggtctctggcgttctcatcttcgacttctgcaatctgttttctaaattctcgcttctctcttaaagctttagcagtgtattcttcaatatcttcttgtgttgccattaattcaacatataagtcatctttcttcttacgacttccattttgaactttgtcagcctgcaaaggactagcattaattttaagagcttgagattttagcttttctaattgattcatttgactttcaatatatctgtcaagcgctttgatttttcgcaatcgctcatatgttttcatcttgccgctccttgaatatgatataatattaataacgaattcatactcaagaagagcttgcgcaagcgagctttttcttttttatcagaaacgcattagcgtatcttgtataataacagtctagcgataactgcgttagattaaaatttacattgagttcccctttctatttttgatttcgctatgttgctagcaagtaacccgatgaactttactagccatatactaatttgttttgtaagaagaagtggctcataccacctctattccgttttttgtatttcgggttatacccacgcaaggattcgaaccttgctagataccattgtgggtcattaatctccttgtataatagtgtttagtactctgtcaatgattagcacatctggacttgtgaagcctttgacagcagttgctaccaaaattattcccaaaagaattcctacacctagaaatgctaccttgtaaacagcgaatagtgtgttaacactctcctctgtatagtcatcatcatttgctctaaagtgacaagctattataaatataagggcaaaacatgtgtagacgaagagaagtacactgaaaattacttgaagtttatcacataggtagtaccaagaatattcagcccttaattgcggataggttttaactaagctatcaactgtcatgttcagtgaatgtgctattccatcaatgatttctttaaattctttcatctactcacctttctttctaattgaaacttcacagaattcatcaagtagttcatcaactgtcattcgtaaacactctgggtcttccagtacaacagtattaattaaagttccatttaatggtctataagaaatttcatatcctggaaatagtatgaattcagttttcataatccacctctacataatcattgtctcgctcttcttcaagctttttcaattcatacttaagcgattgaattttatcctctcgcttacctcttctaatagctggattttgttctaatttcatcacttgtctatcaagttcaagaactcttcttttgtaaaattctatgtcttgaagaaagttttcaactctttcttttagaacactgctttgccaaatagacaaagcgaagaataaactaaaaaccaaaactaaaattgtttctttcatttctacacctccacaatttcaattctttttatatcctcatcactagcccgatttagtttgcttgcttccattattcttcctccaaaagctctggattttcgtaaatattgccaatgacttcaaatttgtttcgaaagttgtcttttaattcttcaaacgtcatatcaataccgtttgatagggtaggaagataagcaatgccatacatgccatagctttcatcatattgaacaatgccctcaaaaccatcgctgtccctaatgacatcattctcaaagacttctttcccattcttatcaaccaaacctgttgattgcataggctcgctaatatatccagtatcagcgtcattttttaaaatacaaaacaaatctgacaagtcctcgtaatcgcttgttgttatcatcatgcactcaactttatcatatactctaaattttggtattgtcattcttccacctctttatatgtactctcaaagatatctttatcgcagacataacattcaccagtttgattcctaactaagtagtcaaagtcattgaattccattacactctcaaaagtatccatttcatgccacaaccctgaaactccaaattcaatgtaatgttctttagcaaattctctaacttttgcatgattattaggtgtcacttgaattgcttcaattggtgttactttaatgtactttttaatcattcttccacctctttcgcaagttgccaagcccattcataatcttctttaatttcttcctctgtgagctgtgcaggttctaattgtttccaattatcagcgtattcaatcgatgtataatgtgaccacgtaaatagctctactttgtcatcttcatttttgcaaagatatgttttactatatccactgccatttggatttggaatttcaactgtatacaacttctcttcctcaacttcatagccaaattgatgcatattcacaagagtttgaatagctttattttttgaacctttggcaatccattcttttaaattaccttctaatttttgttcataataatcaatataaaggaggtataaattatattcaaaatcagtaccggcatgctcttcataccaatcggcaacaaactggggcactactggcttttctgggtcgttaagttgctcgactaattccaacgcataagttaaaccggtctctttacctctttgaaaatcgtttaaaataaaatctgggattgcattctcaagctcatcaatcgcttcttgtttattcatctacttcaccttcacctttctccaattcgtcatagattgtttcagcaattgaatgtacagcgtgccaatcgtcaacatctggcacgcttggatgacaatagcacatagcgatttgcataatagattccataccagacattatttcttgtttattcatcatcttcaccttttatttctttctgattaaaataagctttaattgtatcaataagatagtaaagcagaccacacgtcacaaatcttactcgtttcttcttgtcgtaaatcacaaacattggaaatgtcagccaagctaaaattactaaataaatactaatcattttcgttttcctctctataccaataaactaaatctgctagcacgttacagaccttaaaatcgattctgtgccattacctctttcattcgttttaaaactgcgctgtcatactctggcattttagccaaatcaagatatttcttgacttcgtttggtgtaatgtctagcatttcagcaatttcaacatagctttttagaccatttttaatcgtccaatttctaaaatttcgacaaacgtcaagtggtgtgccagtttttgtttcaacaaacgtcactgtaaatttagctctattacgatttcctactctgctcattcgatttcctcgatttcaatttcaattcttggatttggactatataactttctagctctcaaatcacaaacaatgttatcgtcagaccaaacaatgccttttttatcaattttgttataacctgcatttgaaatgctatcgaaaacagctttgacaagattatcaatgtcaggctttttgaaatgccacattatttcattgaaatacattaaaaacctatcccacgtcgaatccctagcacgttcgctaggctcttttgaaatgcttttcggcgccttcatgtaaaaaatgacttttactttgattggaccatcataaaacggaccgtcatatatttgttcaatcagttctgagcattgtttccgccaagccctcatttttgggtcttcgtacaccccaaattttccttttttaggtctcatttgtggtttaggttcgataggaattacaaatctcattcaacaactcctttgaagttgaatgcattaaagaagtttcgcttgttttcttcgataaattcaaatagcgcttgaatttcagcaacttcttttttcaaatctttagtttgacttgacgtttcaagttctaactcgaattttggaatggcttgcaattttaatttataaatcggctcgaataaatcaccgttttcatctaagcttggttgattttcctttttttcaaaagaaacactaatcttccagttcggattaccaagaattgagattgttcgtataagttcattaatttcaactagatagtctgtttttggtactaaaattttgctcatttttatatcctcaaaaatcaaaagcaggcacatttaaattgtgagtgagtaaggcttgtgcccgctgaaattctttacattgtcgtcctgttaaaccgacacgtactttctagctcgcttttttcgtgattcgcgacacgttgttttttaataaatttcaattcgttttgtgagtttcttctctctgcagtagtcacaacgaccgcagggttttgcttgcgctctgccatgcttaacatcgtccaaatgtttgataaccttagcaagctcgttcaactcatcttgaatagcgtcgatgttttgaattcgaatagctctggtatcacttggattttccttagtaacggcatatatgattggttcaaacggtttattgtattttgcttcaagcaaagttttgtaaactgccatttgcaaaatatagccatacgcttcaaaccagcgaactttgtaattattgccgctttcatctttaatccaaacctcgtcgtcaattggtcctttcgtggttttgatgtcgacaaagtagccgtgttcaacattcaaacagtcaatcttacctttgaactcaacacctgcaatctcacccgttacagcagcttctttttcaccttgatacagcgccgtgaaattcttatctgttgcaagtgcattaatcatgctctctgctgtttcaaatggtgcgtataagctgccgctctttttaaagattgattctttatttttctcaatgaatgcttcgtgagcttctttactttcaaaagcactgtgaacataatttccgacaagcaaagctgtcttatctcgcttatcctgccattcgtcgttaagctctgctaacgctcgagcttcacattctttgaatcgtttaacttgcgagacagaccagtaagcttttgctgattcaaggctgtaatagtctttgccaagtaaatctttagtcatctgtcaaatctccgagttggtcgaataaggctgtttgctcttcttgaatttcgcccgtttctgggtcggcagttggtacttcttcttgtggcgcttcaccaatcaaatctgacaggctttcttcttgtggtgttacgtcaattggtgctgctttctcgttttcagtttcattatcggctgtgattacttcttgcaactcggtgctaagtggtgcatatttgctgataatctgttttaataaagttttttgagccattgcatcgaaatcagtctgccaaggactgtttccaaaactctttgagaaacgtttgccgtggttataagcacgttctttcgtccaataaatcaacttcttaaaaccatttaacagttcgagtgtcgcaaaataacctgccacttcatcttctggttggctaaaatcgacctctagcgtttcaaataacgggtcatatgatttgaattgtgctttgtagattacaccactattaatattcttaacttgaccgcttcgaatagccagctggataagtcctttgtagccaagctgaaattgtgcttgtcgtttgtaaggcacaatgtaggcaaaacctaaacttggttcaattggtaaatttaaagtcgctgctttcattgctgcagttaaaatcgagttgttatcagcattacttaaaagcttgttgttatttacgattgatagcagactagcaatgaattggtcgctttttccgctaactacttcgctaagtttgtttttaaccgctggactgttaaaaaagtccttgtgtgatacttgcatttgatttgccattatttcattctccttgcattttttatttcttcactagttctattatttagttcttcaagctcatttttataattttggataagttgaaggttgttatcaataaaacgttcaacaacttgtgtaagtagttcttgtcttgaaatacctctaattttggctaaaaggtcaagatattctttttgttttgtcgaagcttcaaaacgaagaaacgatttatctttattctgattttttactatcattttattttcgttttcctttcgttctcttcaaattccatatttcacgttttaaacgcttgttttcttgttttaagctcactattttgtcttgatattgattgataatttcaccgtattcgatagcaagatttaaatagtcacttgttctgtcgtaatatgactgctcaaaatcatcttctaaaattatcatgttgacctcaatctaaaatgtgctgtttgacatttactcgataatcaagtggaaagttaaagataatggttaaacgtttatctgttaactcttgtatttcttcgataaggtcttcgtcagaatagtgtctgtatgttttatatgttttagctaatgtcatgctttcatcgttaacgagttcgtcaatcgtttcaagtaatgcttctcttaaatcatcttgatagaggagcagttcatcatcaagtctaatttcaatcatgcttttttctccaagaattctctgatttcatctaagaacgcttcatactcttcaagttgcttataacaccgcttggcttcgtctcgccaaaaatcacggtctgctaaaagttcttgtacatccatatttcacctcaaataatcaaatattgataattgctccactttttcaaaacagactagtctgaaaagtagatagcatttgctcttgcgcctttcggtagaaatcctttttgatttcaaatccgtaagcattccgatttaattcaatagcagcccttaacgttgaaccacttcctgccactgggtcaataataacatccccctcatctgtgaatatttcaatcaaccgtttcaaaactggaataggcttctgcgttgggtgaatgacgggataagaactgtctttctcccagggtagatgatttaaaatcattagaccatcattgttaaacttcggaagcttgtcacgatataaaaccgttgcttcttccgtcgcacctacaatcttcatgttcgcctttaatacttgcggacttgattttttggtgaaatacaacggataagcattgttaaaaccgtgttttttcccgcattggataaccatttcacgctgttgccaactatgaaacacaatcatagctggcgcttgtcctttttgtttcggttctttctttaacagtcttgcgcaaaaatcaaagaaattattgattttaaagtcattgtctgtgtcgaagaaagatttgcctgctaacttgctctcaccgttcttattatctccgtcctcgtaccagcgagggtcgctagcataggcattgtttccaagattgtacggaatatctgcaataataagctgcgctcttggaatttgatagcgttttgcgttttcaaaatggtcgttgtataattcacatttcattttttctacctcaaaatacaatcattttcatttgagacatcttgctgtctcgtgctagcttgttgattaattcttcttcgctaagctctaacaacatagctcttacttcgtttgagtagttgtaatagctttgctcgaattgctggataagtcgttctttcatcgtttgctttcggctccttccgaaaatttaaaaatacggtctttgtctcctcgcatgcctttggttaaacggtcaacaaatgcgttgtcataaatttgaattaactcttttctggtgaaattagtatttactatagttttgctgcgactgtctaaaatgttaaacagaaaacgataagtccaatcgttagcttgtttcatgttgttttctgtcgtactttccttacctaaatcatccaaaacaagataatcacattctgtcagtagttttgtagcaaattcttctgtaaaacgtccgccgccattgaaactagcttgtacacgctgaataagccttgcaactggcatgaatataacgcttttaggctcattgtaaatcttaaacgtgtcattcaatgatttagcaattgcaatcgacaaatgactttttccaacacctgcgcgcccttgcaaaaatgtattcccttctccgcctttgccgtagtagcgaatagttcgttgtgcgaacgctaacgctttttggtcttcaagattattagtctcaaagttcttgatagtggcgtttcttaaatcatctggaatgatactaaccgattcaaaagttgcccacgttttcgccaacattccattaattgtttgttgttcagcacttgaacgttttaagcgttccaattcgcttttctgacattctaaacacatagcaatactgttgtattcaccctctcgtgtcatacgtcgataatatggtttattgtgaatcgtacagacatctccagtatctagcagaattttattggctatcatgtaatcaaaagacatcaattccataatgcacctctaaaatccaaaatctgggtctggttctttcaaagccattctttcagcttctgaaaatcgttctctaggtttgcgataattactgaaatactgttgttgctttttctttctagcttcaaagtcagacaatcttttttcaactttttcaagggtgttgtctcctgctttgtgccaatcaatcaaaatcttgttaacatatttccagctgattttattgtttgttactgcctctttcaaagcagcgtttacaacttctactggcatatcatcttcatcaatccatttattgatgtcctcgatttcaaatggtgtcagcaatcttccgaaacattgttgaaagatttcaaaaagttcttttttactcaatttttcacctctgctgatgctgatgtttatttataattagtatttatttaatattagtagttattgttagttagtatttattaggtgtcgatttctcaactttgagaaactcaactttgagaaactcaactttgagttttctgtatttgagttaactctttatcaagttgttgtttgagctgttcaaatatttcgtcgctaatttttctatcggcgcaaaatctaaagtaagaaataccatttttatcacctagcccttttttataagttctgatgtaatgatgttcttcaagttctttaatgcctgttctaacagctgaaactttatcttttgaacgcttagctatttcctctggatatactcgccaatcgtccttgttcctcaagataaccattaatattcctttagctttgaacgaaagctcatcatcatctaagaattcattactaacagctgtatagtttgatgttgtgttcttgaaagatgtattgcattaattttcttcctcctcaatttctaatatcattttttgtgtttgcactatcagctctgctgcttcaaaacctgcccagaatgctgtttcatctgttgtttcaaatagtgaaatgtgcgttttgtgcaatttattaataatgtcgtttaaaacgtcaattctaattcgcttttcaaaatcgttgtcatcataacctagcaaataggaaacaggaacgttaaaatatttagctagaaattcccaagtgctgttgtctcttggggaacgtttatcgttttcgtaagaagataattgaccagttgatatttttatatcgtaatcatctaacaaaatgtcacttaattcttgtaacgtcagacctctttcttttcttaattcttttaaacgcacacccatttaaatattcacccctcttaaatcgcatcatctggcaaaccgtgagtgcgattgtatgcaatggcacttgcttcccagccagaataatttggcttaaccgtttcttctttcttacgtgctcgtttaccgaacaatgtcaatgtgattatttcagcgaatgctaaaactgctactgcgataattaaatatgtcatgttataactccttaatttttttcaaatgttcttctacttcgttttcgtctagataacctaaaacatcatcagtaattggtgtgtcatagcaaagacgataaccatcaatatttccttgtattacagccaattctgttccgtacgaatatgaatggtttactacgcttgcaccatacccgttttcaaagaaataaatcttttgatgaccgtcatacaacggacgttctaaaactaaatactcgtccatgttttcctcttttctaagccttgtccagaagctttttaaatttgattttcaagccatttcttaatagctcgcttagaccagcgttttgctggcagttcttttgggaaaccgtctgaataacgatatttttgaaatgtgctgtaatcaatacctagaaacttgcatgtttctgtggcgttcatcagctcattaaaaccgtcatctcgttcgatttccaaaagcttgtttaatgtttccttgattgtgccttttagccaatcagaaaattgttgcattacactatccattgtgtttcctttctggtataatgtaagtaagtaaattttgtgtgcgactgattttatcagtcgtttttttggtataatcatctcgaaaggaggtgattattataattgacgtactaattaaatacttatctaacggagatttgctagaagtagcatacgttgatggaactaaagaaatttattctggtaatggcaagaaaattgagaataattttttgcaagtaacatcagttgtatcaactactttcatcaatttaaattccgttgaaagtatcaacgttatcagtaaatcttaataaaatcatttactgttttaatcaactcagaaactgctttgatagtttctgggtcttttttatcagattcctgaatgacttcttttaagtacgtgaatgacacctctgtgaattcagtgattctttcttttgtagccatatttatccctctattctgttaatttaatctcaacaccatcaactaaaaaatatgttctaccttccttgcctttgaacgcatcatatttaaaggctcggaacatatcatcgatgctgtcggcttcaaaaagaaatattcttttgaagccttttttgtaaaaaacgataatactttggcttttcatgtcataccctttctatatttttcgtttcccagctaggctggtatagccctagcagacaatctaatggagttcgttttatcatgtcaattatctatatttcggaggcgtctgctagaactgtagcaacccagctggaagtgatgttattcttttttggttttgctatccaaagcacgctctgtaatttcgtcttggatagctctttttagttcttgtcctaaagggctaaagtccgaaaaatgacttactgcggcaattgctttttgatacgtatcatatctttcaagtgccaaatcagcatatttttgcacgattttttcaggctctgtaagtagttctttcatgtattatcctttctgaattcgtctaaactgacatctaaaacgtcagcgattttaaccatgtttcgaaatgagattttactattccgaatgttttggattgtgtttttactaattcctgctttttccgcaagttctttttttgtcattcctttttcaatcaaaatatgatttaattttttccacatatcttcaccaaaccacaatatgttgtgtatttttgattatacttcactacattttgtgttttattctactttctgttataatatagatgtgacaatcaggtaaacaactttaactaccaaaccaagcgatttcctgtgagtcaaatattatggaaaggagaatgatatgagtactacaaagaaattcgaattcgtaggagatatggcattctttgctgaagaaatcaacaacgatattgccatatcaacagcagctgggacttactttggaaaattacttcctaaaaactcggacgaaacttataatggtgtaagatcatttatagaatttcgcaaaaatttggaacctacagccgacagcgatgaaccacttgaagcaattcttttggtagatgtcactctgcttactagttcaaatcaaacaacgacaatgccgtttgtatatttgtttattgaccaaataatcggcgtctcatgcggaaagattcgagactagaaatatctgctacttttgaggagtcaagcgctaattttacaatagcgtttgattcttttttcttttgtccactatacggatatcgttttggtttcatgtttgctcctttctagccttgttcaatatcttgaactttatatttaaaaaaatatgaattaatttcatcgcttggaatttgtaacaattcgcaagcttttgaaatttctggctgttgccagccacgtttgttgtttgtcttagcagatattgacttttcagacaagttcatgctttgtgcgaactttttctttgtgccaaaaacttcaacaatttttccgtttaatttggaataatcatatttgtaaatcatagatactcctttctttttgttcaatatcttgaactttatgattttattatagcacctcaaaaaataaagtcaagtatttttgttcatttttttgaactttttttacttttatcttgaactttttgaaaatatactatataatatactcatgaaaggtgatatattatgaaagaaaatactgctcaaagattagctcgaataatgaacgagcgaaatttaagacaagttgatattctcaaaaaatcagaaaaattccaaaaagaattaggggtaaaacttgggaaaagtgcactctctcaatacgttagcgggaaatctattccagaccaagacaaactggttctcttagctaaaacattagatgtttcagaagcttggttaatgggatatgacactaacgaacaactaaccgaaccaaacaagccatcaatcgacctttcgaatttgcgtgaaaaagtcgtgatgtttgacggaaagccattatctgatgatgacgttgaaaaaatagaacaaattattagactttcaattgaggtaatgggagatgaggattgatgagcttttaaaagaatataaaatatcattattcgtttttcctgctgatatgtgggaaaggtctgggttctactttccagacctaagacgaatatgcgtcaacgaatcattgtctaaacaagaacgtgaaaaagtcatcttgcatgaaatcggtcatattaaccatgaccccaaaaattacaagagactacttttgcaatacgaaaatcaagctgatagatttatgattcatgaattgctagtcgattatttaaaatcaactgatatttacgattttaattgggttcgcttcgctacacagtacggcatttctacaacttggggtgaagcgatgatacaagatgaatttaggaaaattcagcaaagtgttatttaaaggcaagaaacaacatgaaagaagtatacaaagaatcagcatttgttgcaggaactgaatacagaaaaaagaacgcagaaaaagcatacgatttagtttcaagtgacactacagacatgcatactgacaaagtcagacttgaacttgaaccagaaaataagcatgataaatatgctattaaaatatatatttacgatatttttgttggttatgtgcccaaaaaaggctatagaaaacttcgtaagctattgcacaatgataattatgtttgtaaaacaacagctagtgttttaggatgcgaagatgaaccaatttttaacgtgcactttacattttacgaaaaacaataattaaaactacgtgcaaatactgaaccacgttaaaagctggataggaggattcatattatgaaagacgaaaagaaagtcttaggtattttggcgattgtttttggtggcattgccctagtcggttcttgggtgcctattttaaacaatgtttcattctttattgctattgtcgcactgattttaggtgtaatcgcattaattattaaccgcaagaacaaaaaagtgcttgctattgtcggaacttgtctatctattgcttcaatcatcattgtacttgcaactcaatcaatgtatagtagtgctctagataatgctagcaaagcgattgatgaagctagttcgtcaattgatgctgattatagcaagtcatcttccgaagaagctagtaaagaagcagaagctgatgcaaacttcaagtggactgacgcttattttgatagcattgtagatggtactactacttatgacgagattgtagcaactgtcggtgaaccaactactactagcactgacacagattatgatattgatactgattcggaagttccatctatggattgcgattgggatttagacgatggttcatactatgctagtgtttcaattcactttgttcaaaaaaacggaacttatgtagttgattacaaaaccggtactggtcttaaataaacaaaaaaagccctcacactctccacgaccaaattttgagtgcaagggataaaaaatacattgtgagaaagcatcctagttgaaactaggcatctttcctttacttattttatcaaaaagtgaggtgatgtcaagagtttctctaagttaaaaaagccttgtccagaagctaaatttttaacaaggagataaaatgaaatacaacaagacaaaatatccaaatattttcacttacgaaactaaaaaaggcaaacgctactacgttcgccgaaaatttaagttacatggtaaacaaacagaagcaagcaccagcggtttaaaaacagttgcagaagctagacaagcacttgctgaaatcgaaaacaaaatcgcaaatggtgactatgacccacgcaagaatatgaccgtggatgattactggcagatatacagcgaaaatcgtatcaaaactgggcgttgggcgccagatacagttatgacaaagacaagctggtacaatcatcattttagtaaacaatttggtgctacgctattaaaagacattaaacgcaccaaatacgaagcatatatatctagtttattaaatagctattcaaaagctactgtcgttcaaatcaacgctctttttgaagctatggtaactgacgctgtagtcaatggttacatggataagaaccctattttaaaaatctacataggtaaaagcaatattcctactaaaaagaaacgattgtctttagaggaatttcgttattgggataaatgcgctcgtaaaatattaagtaactatgattatactatggctagactgacttattttggcttgcgtcgaagtgaggttctaggtattaaattcagctcattaaaattggtgaacggacgttttagaatattcttggatgaaagcagaacagaaagacgtccagaaggtggcagaatgaaaacaagaacttcaaaacgttatgtgttgcttgacgaagaaacgacagacttactacaaaaagccatgctgtttgcaagacaaatcgccaaagagactggcaggattctcggacaaaatgattttatttttgttgatgagggagctaacctcaagaaacgaagagggcaaccaataaaatacgctcatattgctaccatttttaaaaaagtaagcgctgaatcaaaaatccacgcctcgcctcatatgatgagacatttttttgccactcaaggacaaatagctggtgtatcaatcgagcatatggcggcagctttaggacattcaacatcttatatgacacagcaatatacgcatattaaagacgaggtagctggcgaagttactgattcattcttgcgtgcaatcaagtaaaaaattccccccttttgtccccgccaaaaaatcaaaaaatacctaaaaataccaaaaaaatatcatatctataaaatcaaaacccttttaaaataggctttatttcaaggtttaattcggtttgtcaaaatagcttatattatagcacaattacgacagactggctaaaactttgtgaggttttgcgcaaagatttgaaaaaagctgattttctgaaaaatattttcatattttctcacaaatctagcaactactaaaaaagcctaagattttcatctcagactttagtgatgtgattatttcatattttcaatatattggtaaacaccttgtccagcaatggcaccgtcgccaacagctgttgcgatttggcgaagttctttttgacgaacatctccaatggcaaaaatgcctgcttttggtgtcatcatacgttcgtctgttatcacccaaccagcttcatctgtgatgccaaggtcagctaccatgtttgttactggattaaccccaacgtagataaaaataccaccaaattcgtgttcgctaagctcaccagttttaacattttcaacagttacaccagagactttaatgtcagttcctttgatttctttgacaacagaatcccagataaagttgattttgtcgttagcaaaagcacgatcttgcaaaatcttttgagcacgcaattcatcacggcgatgaataatcgttacagatttggcaaattgtgtgaggtaaacagcttcttcgactgccgaatccccaccaccaacaactaataaatcttgattacggaaaaaagcaccgtcacagacagcacagtaagaaacgccgcggcttgtgtattcttcttcaccaggtacgtcaagagtgcggtatttagcaccagtcgctaaaataattgtttttgcttcgtagctagcgtcttcagtgatgacacgtttcacatcgccagcatcctcgatagatttcacaataccgtaaatattttcaacaccaaatttttcaagcggcgcatgcatattcattgacaattctggtcctgaaatatggtcataccctgggtaattttcgatttctgaggtattattcatttgtccaccaggggctccttgttcaataataccaactttcaaattagatctagcggcataaagccccgcagtcatacccgcaggacctgagccgataattaatgtatcgtacatttagtcacctcaatatctcgattattttttcattgtagcaatcaggtattaaaattgcaattattacgctttgaacattaataaaatcgccataaatgcaaaggacaaaactgggatagtcatgattgacatcattaacacatcatataaaaaggcttggcgttctttggctgttttgtccaatttacgggcagcacgccaaaaattccaaatgataccaactaagaaaacaaaaacaatggctaatagaagtcctttgatataaagactaaaaatttctaaaaacatacgtcacctatacttaaatcagtttttgctttatcactctaaaaagagctgaaaaagtctctcagctcttattataacaaaagtcagtggttaaatatacgtttttgtatagtttgcgaagaattctttggttctggcttcttttggatgattgaaaacgtcatctggtttgccagcttcaaggatatgccccttatcaaggaataagaccttgtctgccacttgataaacaaagttcatgtcatggctaaccaaaaccatggtttgccctgctttagcggcatccgcaattgatttttcaacttcgccgacaagctctgggtcaagcgccgaagtgggttcatcaagcaagaggacgtctggtttcattgccaaagcacgtgctaaagccacccgttgtttttgcccacctgacaaatgacgtgggtaatgattttcacggtcagacaaaccaaccttagctaattcttctttcgcaatttttgttgcttcactatctggaatcttcttaacaatttttaaaccttctttaacattttcaagggctgttcgacgttcaaagagattaaattgttggaaaaccatggctaatttacgacgtaaaacaaggacatcttccttagaaatcgtctgaaaatcaaccttgaaatcatcaatggcaatgctgccaaaatcaggtttttctaaataatttagactacgcaagaacgttgattttcctgcacctgaagcaccgacaagagccagaacttctcccttttgaatatcaacgtccaaaccgtctaaaactttttgtcctgaaaattctttggttaaatttgtaattttaatcataagcgaatacctcctgccacttctttttgacttgattgaggcgtatcgatgtccattcgtttttcaatgagacgaccgatttgttcaataataatactgattacccagtaaacaagcgcaactgaaatgtaacgttcaaaatagcgataatccgaaccacctaaaatctgcgcttgggcaaacatttcaacaatacctgcattaaatgccaatgatgttcccttcgtcaagccaatcaagctgttaatcaacgtcggcgttgcaatgacagctgcatttggaataatcacgcgacggtaaacttgaaaggaggtcattcccaagctacgcgcagcttcaatttctccgacatccacagcttgaatcgcagctcgaatggtttcgctagtgtatgccgcttcattgaaagcaaatgcagttaccgcaaaaacagatgctggaatagcattgatattccaatcaaaaccgtatcttattttgagaaatttcaagaaaagtgggataccgtagtaagtcaacatgagttgaacaaggataggtgttccacgtaaaaagctaacaaaaacagcttgaatcggatacaaaacctttgtgcgattgattttcacgatagcaaatagcaaagctaacaacaagccaaatatcgcacctgctattgttaagccaagcgttgttggtaaacgttctattaaagacggaatggcatcaaaaaccgctcgccaactgaataattgaccctctggaattttttcaaccaacttatcataccaagacaagccagctgctaatgttgttaaagtcatatgagctccttttctattatcctacgctataacgatagccctaccaccaatccttttcttttcctttttcatttttaatcgattgttgaaacgaagtcgccgccaaaatattgctcgctcaattcagccaatgtgccatcgtcttttaactctttgatacgtttattgacaaatttttgtagtttagctccctcatttgtatctgcaaacagcaagtattctaaaccatctgtttcgccaccaatatcatctgttacattggtcactgtcaaattgaagccttggtcctcaacgagataattcgatgaaatcgcatcatacaaaataaagtcgattgtcccattttcaatatgttgcacacgtgttgtcaatcctgttgagctagaagcgtaattaatcttaatcggctctttatcaggattttcatcgttccatttttctaaaacttgagcatagttagaacctgaaatcacttcagttgattttccagataaatcatcaagactatcataacttgtcccttcggcacttgttatggcatagtttgatttagaaattgggtctgagaaaaggtacttttcagcacgttcttcattatagttaaagtcatttgccgcaatttggtaacggtctgcatctactcctgttaaaatagaatcaaacgccgttgtcacaaattcaactttatatttcttggaatccttaaaaatggctttcaccacatcaatatcgtaacctttaaaggtgtcattttctttgtaagtaaatggtgctgtatctgagtctgttgccactttgatgactgttttaccacttgattgtgattgattggaacaagccgccagagctagtgtcaacaaaaataagaaaccaaacgatagtaatctcctctttttcatttgtctgcctcttttctaataattcctttccagtctatcaaacttagccacactttcccaatacattttttctatggacttgataagaaaaaactatcaggaaataaatcacatttcttgacaaagcaaaccaagcgctacttgattaaaataaaaatcccgaagttatttcgggattctgttttctagaaagtttgttttcttgctttacgttcagcacgtcctttggcacgattagcggcacggcgttcacgtttgcgtttttcatcaactttccattgaatttttttcttgtagcctggtttgatttttttctttttctttttaaccaaaccaatcatttcagtatctaatttttggtaagatttttcgcggttagctcgacggtcacggtcgtaagtatcttgaaattcaccatttttaagcattttagggacaaatttaatccccattttttcaagttcacgaatatcagaatcgtcacttggtttgtaaagcgtaatcgcaataccatttaaaccattacgtcctgtacgtccaacacggtgcacaaagaatgataaatcttgcggaatagcatcattgataacatgactaactccttcaatatcaatcccacgcgctgccaaatctgtcgccacaatgtattcgtatgacagttttttgatttggttcatggtgcgtttacgttcgcgtggaggaatatcgccgtgaatttttgccactttcaatccatttgacacaagatagctatgcaactcatctgcacgttcttttgtgtttacaaaaatcatggcaagatatggatttaaggctttagtgatttccaagatttgcgcatttttatcacgtcccttagttgaaaccaaccaattatcaattgtgtctgcgataacagtagttgtcttgattttttccatgactggatttgtcaaatattttttcaagaagggttgcaatttttgtggaatagtcgctgagaaaaccaaaatttgaacatcttttggcaatgtccctgcaatcttatccactgtatcaaggaatcccatatcaagcgtcatatcagcttcatcaacaacaaaggtatgagctttataaatttccaaatcacctgatttgaccaaatcatagatacgaccaggtgtaccaatgacgatgtgtggctgagatgatttcaatttttcaatttgacgtagtttatctgtaccaccaacgtagtttgccacacgaatttctgtttcagatttttcagcaatttgtttggttgcttgataaatttgcgttgccaactcacggcttggtgctgtgataaccacctgaacattattgctgttttcatctaatttttcaaaaatcggcaacaagaaagtgtgcgtttttcctgaaccagttttagattctccaaccaaatcacgaccagaacgcacaacgggaattaacttttgttgcacttctgtcggatttgtgaatttaagctctgcaagcgcctcacgaatgtagggcttaaaattaaaatcgttaaaagacatgttttacctcaatttcttatctcatcaagtttcacttgaaaatttctctatattatttacttatcgtttaatccctagccaaaagcgactaggcgaattttttcattcttttctattatatcattaaaagggtgattaaagcaaagtacactgcgatttagaatcaaaaacgagctggaaacccaactcgttcatttattaaaatgcgtaaagtgcaatcaaggtcaaaatactggcaatagcgccaacactccacaagaaagcatcaactttccattctgaccatttttctgattttcctgtcaaaccaccaagttccaaatgatgatggaatggtgtcatgcggaaaatacgacgcccttcaccatattttttcttcgtgtatttaaaataggacacttgaagcatgactgaacttgtttcaaagacataaacgataccaatgattaacaaagtccattcttggcgaagtgcaatggaaatcgctgcaagcattgctcctaaagccagacttcccacatcgcccataaagactttggcaggtttatggttaaagacaaagaagccaaacaaagcaccaatcattgtcacgataatcaacaagacatcaaattgtcgttgagcaaaggcgatgataccataggcaaccaagctgatagcaactgaaatagaagccaaaccgtcaataccgtctgtcaaattaacggcgtttgaaaaaccaacaacccagaaaagaacaaagaaaacgtaaagaataccaagatgaagatcaaaaccaaagacatttaaatcatctgttccgcttggacggacatgaacgaagtagaaaatcaagccaccaataatttgcaagctcattttttgccaaggtgtcaagccttcattaatttgtttaaagattttcaaaaaatcatcaagaaaaccaataatcccataaatgagaaccaccaaaagaatgcctgccgttgctcccattgaagcaccgttttgcttttcgacaaacaagctaaaaatgaggctaacaaggattccgactgttagaaaaactgttcctcccatggttggagtaccagctttagccaaatgttgtttgacatcctcgtgcatttgttgcccaccgattttcttgatttggtaaatacggataaagtggggcatggcaaatactgtcaacacaaaagcgacaatacctgcgattaaacttaaaaacatcttagtttattctcctagagtaattgtaatttttttaacaccgtcgatatctgtttcggattcgacactttgtttcgtgactgttcccgaatcggaacccttaaaggttatcttaattccagtccatttagcaaatttttcaacattttctttcgtccaaccatacatatctggcactgtttcaagatcacctgtccaaagcaagatttgctcattagcagaaaggttacttccgacttttttagacattttcttaatcttgctacctgaaccaacaacaactggttgtacaaggttatcacgaagttcttgggctgtatctcctgggctttcaccgatataatcttttagtgtatattcggtttctgtatcagttcccgttaccgctgtactagtcaaggtatctttaatcatcatcgccctttcaagtacaggattgacaacatcttgccaatacatagctctgaatttttcagatggttgttgaagcgttacatacatgataaattctgggtcatctgatggcacaatcgcaacaactgagtaaatgtaatcattatctccagttaagtacccaccaccgtcttcggccgaagcagcaatttgggcagtaccagatttcacagcgacggaatagtcaccaacttggatatatggttgacctgttgtgctgttatacaaggtaccatattgtgaatcggtaccaacagttaccatgtaatcaagtgtttggtcagcagcatcttctgaaacaggattaccaacaacttctgatgtcgctacacgtgccgaattcgtatttggatcgtaaatctgactaatgaattgcggctctaacatgacaccaccattagagatagctgtaaaagcacgcaacatttgcacttgtgtaacaccaatcccttgaccaaatgagctcatggctactgttacttcattatcagaaggtaacaaaccgctgtcctcatttagcataccaaaacgtgttggataaccaaatttgaaacgcgaaagataagtgagccacttgtcattccccattttttgttcaaggctagtcatagcaacgttacttgaccaagcaaaaccttgcgcgtaagtcaggtactgaaccgaagtcattccttcgttgacgttccagtcattgattgtcgtatcagcaaccgtaataccattgattgttgaaataacctcattaggattgaaaacaccgtcatcaattgctgaagcaagggtcatgactttcatggttgaccctggttcataatagttttgatagagtaaggtgttccaagtttttagattatcctcactataaccatccaaggtttgcgcattgtaagttggacgttgtgtcgttgctaaaatttcacctgtttttgcattaacaactgtggcactggcatacgttccttgggcttcattttggaagatatccatttgagactccaagtaagattgcaatggttcagaaagtgttgtgtaaacgtctttcccatcgacagcttgtttaaccgttgtttcagtaccaagtaacagattaccatttttatctttttgataagtcactttaccatctgtacctgacaaaatatcatctaaagctgcttcaagacctgatgttcctacaagacttgatgtgccatctttattttcttttaattgtgtcaaaccaaggaattgtgaagcaaaaataccatttggatacatacgtccgggcgttgaagtgaaaccaattcctttaatgccagcttcgtccatagccgtttcaatagctgattttgtactgtatgacagcccagaacctgaacttccgaaagaaacttggaaaagcccatcttgttttagctgactcagcacttcatccttgtcaattccaagctgttcatttaaaatctctgccactttctcatactgagattttttgacataaagcttttcacctgttgatgaaacataagatgttgaaataatggcatagatactgtaagttgttgaatcctccgcaagagcaacaccattacggtcataaatcgtaccacgtttagcctgaacggttactgtctgttgataaacttctgacgcttctgttgacaaattgtgtccgaactttgtatctgtcccaataataatggcaaaattgataacaaacacaaagaaaaggaagaccgccagaatcatcaaattctgaccaacgcgctcacggtttttgttgggcgttcgtctatcctttaccacatagtctaaaaaacggttcattaatttcttcatagactatttttactccacctgtttaatattatcctgttggctggtcaagcctgcatttcctgctatttgttcaatacggtcacgacttgttaattcgttaacctcttgtttagcattatcataatctgtctgcatatcacttatctgactattaagatttgtgatttcttgttgcacttgtagattacggctctgtaggtaaataatactaacagccatggtaatagccgtcaaaataatagaaccataaaaaactttttcaattctcgaaaattttctaatccgtcttttaagcgcattagaaatagcttcgttacgatgtttatctgtcataattatttacgaacctttctagccacacggagcttggctgagtgagaacgattattgacttctaactcttcttcgcttggcaaaataggttttcgattaaccaaagcaagcttaggttgcatatcctcaggaataaaaggcaaccctttcggcacatctacggtagaagcttctttgaataattgttttgtcaaacggtcttccaaagaatggaaagtaatcactgaaatgcgcccatcaactgccaataactcaatagcttgttgaatagactcatctgccgcaccgagctcatcattgacttcaatacgaatagcttggaaaatctgcttcgcaggatgtccttttttcttgagttccttagcaggcttagcagatttaatgatttctgctaagtctgtcgttgtctcaatcggcttaacttttcgcgcctgctcaattttacgtgcaatttgttttgagaatttgtcctcaccatacttgaaaaaaatacgaaccaagtcatgataatcataagtgttaaccacgtcataagctgacaaatcttggtcacgattcatacgcatgtctaaaggcgcatcttttttatacgaaaagccacgctcgcgctcatccaattgtgggcttgacaccccaaggtcatacaaaataccatcaatttcagtcacaccatgagacgccaaattggaagctaggtttctgaaattatccttgataaaagtgacttgtcctttttcaatatagtcttttaaacgaatttgtgcattatcaatagccgtctggtcttggtcaaacgcgtaaagatgaccagtcggtccaagcttagaaagcaggtactcactgtgccccgccccaccaagcgttgcatctacatagacaccatcaggcttgatatcaagcatatcaacggtttcatgtagaagcactgtaatatgatgaaaatctgttgtcatacctttcattatatcataaatcataagattcttccttaaaacctccaccagaaatacaaaaaccaaaagctgataatatcaagcttttggtaatgttttttattgtaaaggctgccatctgcataaggacaagcagtaagcaaaaatcaattattctcgaatttgtcctttaccattaatgtaaaattttgtgcttgtcaaagcttccaagcccattggaccacgcgcatgcattttttgtgttgaaataccaatttctgcacccaatccaaagacaaaaccgtctgtgaagcgtgttgaggcattgacataaaccgcagccgcatccacttcatcttggaaacgttcagcgtgttcaaggtctttggtgataatagcttctgaatgatgagtcgtgtaacgattcacccaatcaatagcgtcatcaacagaatcaaccactttgacagacatgacataatctgaaaattctgtaccgtaatcctcatctgtggctgctactgcatttttgaaaatagctagcgctttatcatctgcacgaaattcaacagcatgaactttcgcaattgcttcttctaactgtggtaagaatgtttttgctaccgctttgtgaacaagcaagctttctgcagcattacaaacacttggacgttgcgttttggcattaatcacaatcttcgttgccatatcaaggtcagccgaatcatcaacgtaaatgtgaacatttccgacacctgtttcaataacaggaacttttgatttttctttgaccgtttgaattaaacgagctccgccacgtggaataagaacatcaacataatcaacagcttgcattaattcttcagcaacagcatggctagtatcctcaacaagctggacgacgttttcatttatacctgctttagcaagagtttttcggataaccgtcacaagggctgtattagaatgaatggcatcgcgaccaccacgcaaaataatagcattacttgttttaaaagcaaggctgaaagcatcaacagatacatttggacggctttcaaaaatcatggcaatcacgccaagtggtacacgtttttgaacgattttcaagccatcaagattggtataaccacggacaacctgaccaatcgggtcttgcaaatccgcaacttgacggacgccctcaacaatcccctcaatacgcttagcatctagacgcaaacggtcaaccataacaggcgaaataccatttccctgtgcttggtcaacatcacgtgcattttcagccaaaatatagtctgtctctgtaagcaaagcatccgcaacttgtcctaaaatctgatttttttcagcagttccaagctttaccagactttggctagctactttagcatttttacctaattcatcaatatagcccatctttggtcctccttttaattcacttgtgaaaaccacgttccaatattagcaccttctagagcttttaaaatatcacgcggatttgcaccgttcatcaaaatcatctgactgttattgtcaaaaatcatttgagcactcttaatcttgctgagcatgcctcccgtgccaaatttacttccagcaccacccgctgatttaatgatttcatccgtaatttcagtaacgtgttcgcgaagtttggcatcatcatagatatttggatttttatcgtaaagtccgtcaatatctgataacatgattaacaaatctgctttagttaccttagctacaatcgctgaaagtcggtcattatcaccaaattttgtcgtgtggtccatttcatcaacgctaatagcatcgttttcgttaacgattggcacaattcccattgttaataacatttcaaaggcattagtgaaattttctaagctttcaggatattcaataacatcacgtgtaatcaacagctgactaacttctgtctgataatgcgaaaagatttgagaataaaggctcatcatggcaacctgcccaacacttgacaccgcctgttgacgtgcaatttctgtcggacgtttgtccatatttaacacattgagcccaaatcccatggcaccagatgacaccaaaataacatcttttcctttattcatcaagctagagataacaaaagctagttggtcaattttttcaagattaattttgccatttggcatgacaagcgagcttgtcccaatttttataacaattcgattaacagtttcaaaatttcgtttcatatgcctattatacactaaaaaaacagtccgaggaactgtttttattagctttattacgaaatcaatgggatttttaacacaataccctttaggagattttgaaagggattaaagctcttcgccatttgaagcaatgacttgtttataccagtcaaatgattttttcttactgcgacgtaaagtgccctgacctgcgtcatctcggtcaacatagataaaaccgtaacgtttactcatttgacctgtactggctgaaatcaaatcaatacagccccagctggtgtagcccattaactcaacaccatcgatttcaacagcatcttttaaagcaataatatgcttgcgcatataatcaatacgataatcatctgtcacatacccattttcatcagggacgtccttagcaccaagaccattttcgacaatgaataatggcttttgataacggtcataaagctgatttaaggcattacgtaaccccaacggatcaatttgccagccccattctgttgattctaaattaggattttttatcgagcggaaaaggttgccagttgttgtttcataatcctcctcaaaaccacttactgtacgtgatgaataataagagaaagaaacaaaatcaacagtatttttcaaacactctaaatcaccatctaacatctccaactcaatctgttcacgttcaaacatttttttcgcatagtttggataataaccacgcgcttgaacatcaataaagaagtaattcttacgatcactatcaatggcttccttgtaatcttctggacgacaagagtaaggataatgcataccacctgctaacatacacccaatttgattttcagaattaatatcgtgtgccattttagtcaccaaacttgaagcgactaattgatgatgagctgcttgatacatgagttgtttctcattatctccttctttaaaaataagcccaccacctacaaagggactatgaattaggatattaatttcattgaatgtcaaccaatagttgaccaaacctttgtaagctgtcataaccgtttgcgcataacggacataggcatctactaaatgacggtcacgccaaccaccataacgtttaattaaactgactggtacatcaaaatgtgccaaagtcacaagaggttcaataccatattttttcaattcttcaaaaatatcacggtagaaatcaagtcctgcctgatttggcatctcatcatctccatttggaaaaatacgagtccacgaaattgacatacgataaaccttgaaaccaagctctgcaaataatttaatatcgtctttataatgatggtacatgtcaatagcttctttggcaggataaaaatgattatcatcccactctaaatgttctatttcaccactagaaattgtggctctgtcttttccaataggtaataaatcaacatttgacaagccacgaccaccttctaagacaccaccttcagcttgattggctgccgtagcaccgccccataaaaaattttctgataaaaccattttctccctccgcatgttataatattttaaaattactttagcatttctggaaaacgacttcaatgagtccaaaacgacttggcaaaaggtttcattttaaattaagtcaactagaaaaagctgaaacaaaatttcatcagaaaggattttttatgacactattacaagatattgagtatctagctcagacacgtaaagattccaaaaaagacattgcaaactttattttgactcataaaacagagttagctcatttaacactagatgatattcaaaatcaagcgtatatttcaaaatcgtctttagttcgctttgctaaatctttgggattttctggttggaaagaatttttagtgcctctaatggaagaaattcatcaagagaatcattatttttctgatgttgacccagatgttccctttaccaaaaacgatgataatctgaccttagcaagaaagattgcacaacttcaaatagcaagtattgaggatagcttagctctactagatgatgctctactaacacaagcggcctattccatcaaaaaagcaaaacgtgtcgccatttttggtatcagtcctaataatattttagccgaagttttccgacgacgtatggctggtattgggaaaatcattgaagttccacgtaatgacgaaatgggcttgacttctctatccttaacatctgaagatttagctattttgatttcctactctggtcaaattgttcaatttccacatcatttactggaacatcttagcgattgcgacgtgacaacacttgctatcaccagccaagaaaaatcaccattggcacaattttgtgacttcacgcttccgatttctggacgagagcaaatcgttggaaaaatttcaggctttgcttcagaagagtcaatcttattcattctcaatatcctctacgcaacttatttttcattagactatgaaataaatctatcttataaacaaaaaatggcagagctcctagaaactggacgtcaagataagcatatataacttgaaataaaatttcatttttaaagcgctaccatttatgaaaatgaaacctttttccatcccctttcctaagtcttgaaagggcttttttgctgtgataatcttatctcgaaaaaaacaaaagggagacaagattatgtcaaaagaatatcaaacattggctacccaaattattgccttagttggtggtaaagaaaatgttgctaacgtttatcattgtcaaacacgactacgctttacgcttgttgataacctaaaagctgataccgaagctcttgaaaagctcgacggcgtaacaaaggttattatcaatgctggacaataccaaatcgtcattggaacacacgttgcagatgtctttgaagaaattgaaaagctcgttgaaatatcacaagatactactacccaagagaaaaaaggcatttttgatactatcattgattttgtcgcaggaactttccaaccaatcatccccgcactctctggggctggtatggtaaaagctgttttagcacttcttgtcgttttcaatgtcatcaccactgattcacaaacctattacatgcttaatgtatttgcagatggtgtattttacttcttaccaattctcattgcctttactcaggcacaaaaactcaaatgtaaccctattttagctgcaggtgtcgctgccatgcttttacacccaaattggtcggcgcttgtgactgctggagatgctgtcaacttctttaacgtcattccatttacactagcaagttatggttcaagtgttatccctattattctcatcatttttgtccaatcttatgttgagaaattcttaaacaaacacattccaaaatcaatcaatattgtttttgttccaatgctaactttccttatcatgggaacattagccttctcagttcttgggccaattggagccattgtcggaaattacttagctaccgttttcacattcttagcagaaaatgcaagctgggcacctgctttaatcattggaacattcttaccaattatggtgatgtttggtatccataacggtgttgccccacttggaatcatgcaaatgtctcaactaggttatgactcaatctttggtcctggctgtgtctgttcaaatatggcacaagcaacagctggtgcagtcgttgctttcgtaacaaaggataaaacaactaaagaaacagctattcctggttctatcacagcctacatgggaattaccgaacctcttctttatggtgttaatctacccaaacgctacccattgattgcttcaatgattggtggaggacttggtggtctttatgctggtttaacacatgctcaccgatttgcgactggttcttctggacttccagcagttcttctctatattggtgataacacaatgacttatttttacaatattatcattgctattgtcattagcatcatttcaactgctattattacctttgtccttgccaaacacttcgaaaaagaagaaactactgacaaccttgatacaacacaagctcctgtcattacaggtcaagaagtcatgtctccattgactggtgaagttctccctattgaaaaagctgaagatgaagtctttgcatcaaaagttatgggagacggtgttgttatcttaccagaaacaactgatgtctatgccccatttgatggtactatcgcaactctctttccaactaaacatgctattggacttgtctcagacaagggagcagagattctcattcatattggtatcaataccgtagatctcaacggagaaggatttaaagccttcgttaagcaaggagattccgtcacaaaaggtgacaaattaatttcatttgataaagtagctattgaaaacgctggctactctaaccaaacaatggtcatcattacaaacggttctaattataatcaaatcattaaacacgacaatcaatttagccaaactggtgatttgattttagaattagagaaataaaaaaagcggaaaaattccgctcctaaactctcctcaaaataacttggggagagttttttataactttttccaaaatgtgtggtaaatcactatttgagaagcgattcctatcaaaacagccagtattgcaaacaaaacattcgccaacagaacatctttgagtagagctccgagtaaaaatgtgcctgcccctagacttccacctactactaaggcgattaggataatagcgagggtcagccattgtcctgcgtgacggttaaaaagttgggtcacatcttgccattttaaatcaagaaatttaaaatcacggcgatacataagttgtccctgaagcaagatactcgcaagaagtcctaggataaagaaaatgaccaacactagcggtgcttttaagacaaacaagcccactaataaataaacgatagctggaacaagtgcttggagtcctaccagcgttaaaaatttttgaacaagaaaatccttgaaattgattggtagagctttaaagaaagtcagattttctttttctaatgaaatcccaaccccaacaaatgagcttggcgtgctacaaaaacttcccaaaacaattccgataagcattgccacaccaaaataatcattcggcacttcagccaaactaaccccatttgtcacactcggtgtgataaaaatcaccacataaatcaaaggcaatagataagtttgtgtcagcaaggtcgcattttgtaacgttgacatatggtgacgaatcatcatcgttttcaacgatttacctttcaacgctttttgagatgctgacgatactttttgtttcggcttagatttaggcttagcataaagaacttctttgtaatacgttggcatcaaccatttgacaaccccaactgttaaaatcatcaacactaacaaaggtagccaaaaattaagaacagtcgctgattgaaatggtgcttttaccacgtcataaaaaccacgaaaatagggtaaaacagtatggtctgcaagggcaacattatcatcataagtcatgttttgactgttgataacattcatgtaaagaatagcaccgactgctccaatcgttgaaatagacatgagaacagtcgagacgatttttcggtgctgacttcgaagaatgatttttcccacaaaactattaagataaagtgccaacaaaatcacagccgcaaacagaacaaaaaagaggataattgtcaacggaatcgctagtacaagccctgctatttgccagtaagcgataaaaaacaaggacaaaagtggcattaaaaatgtaatgcccataccaaaactggaaatcacttttgccatataaagttcactcgatttaatcggcaaatgtgcataaagccgaacatcatcgctctcataaaaaatgctatacatggctgaaaaagcatttagagttgccatgataaagaaaatcgctatgtaaaaagagaaataccctgggaaataacgaaaatcaatgttagcatacatagaaatgtaaataaccgcaaacaaaaggctgaggagaatttgctggcgcatcacactcttataagccgaaaaacctttgcttggtttacgttcttgttttcgctttgccgccgtgacagactgtgggctagaatagaggatattaatcttggttaactcccaaactgttgaccaattcatacgcctagccctcctcttgcgctttacgccctgctaattcaagatagattgtttccaaatctttatcagggtgattagcttttaattcatctaaggtaccgataaaaatcaacttgccatcttttaaaattccaatacggtcacaaagttgctccgcaacagcaagaacgtgtgttgagaaaagaaccgtattgccaccacgcgcgtgctctttcatcatttctttcaaatcaaaagatgcttgtgggtcaagccctgtcaaaggttcatctaaaatccaaatatctggatttgatatcagagcaccaataagaatcactttttgacgcataccgtgtgaaaaactatcaatcaaatcattgatattctccgcaatatcaaacaaatgtgacaatcgttcaatccgttcatcagtgagcttatcatcaacgtcataaattttagctaaaaaatgccagtattctatcgccgttaagttcaggaaaatatcaggtgaatcaggcacgtaaccaatgcgttttttgatgtcatcacggtgctcagaaagaggtaactcatcaacatatacttcaccatagctcgcttcaatgattgacgttaaaatgctaatcgtcgttgtttttcctgcaccattatgcccaatcaagccaaaaatttcgccattagcaatggtcatattgacatcacttagtgcttccttatcaccatacaactttgaaacatgatcaaatcgaatcatacctatctcctttccctactctcctaacaatggttttatccattttgaaacttctttgctctttcggtaatccgcagcaaattcctgtgtcaactgtttcaatgattttgccccctttggcagcgaaaaatcatgccttgtactatacaaatttaactgacggtcaaggtgaagagcgctcaatccagcatctccagacctaatcacctcatttgacgcagaaagtaagatttttgacaaatcgttatcttgacgaatggtcatatcttcataagcattcctaattgctttgtataattcactgcacttctcttccataaaatccccctaaaattttatttgtactattaaagtaacacaaaaatatttttattctatcttaccttttcagctatcatttgtcaaataattataaaaaccctccttgaaaacaaggagggttcagttagttattaattacaatgattcgtaaagatttatagcgttatcaactgtgaagccgtattcttcaaagattttattgcctggtgcagatgcgccccaagtatcgattgtaagagttttaccttggagaccaacgtatttgccccaaccaaagcttgaaccagcttcgatagccaaacgttttgtgacgttagctggaagaatgctttctttataagcagcgtcttgttcgtcaaagatgttttgtgctggcattgaaaccacacgaacatgaacaccttttgcttccaaagcagcttgcgtatcaagcgccaatttcacttcagaacctgttgcaataaggataccgtcaaggtcaccttttgcttctgaaaggatataagcacctttattaacaccttctgctgccaattcttttgtcccttcaaggacaggaagattttgacgtgtcaagatgagcattgttggacgattggtttcagcaagagcacgtttccatgcagcatttgtttcgttaccgtcagcagggcggataacgttaaggttaggcatagaacgaacgctagccaattgttcaactggttcgtgagttggtccgtcttcaccgacagcgattgaatcatgcgtcatgacataaaccgttggtaattgttgaagagcagccatacgaacagctggaagaaggtagtttgagaatacgaagaatgtaccaccgtaaacacgagtaccaccatgaagggcaataccgttcatggcagctgccatggcaaattcacgcacaccaaaccaaatattgcgaccaaggtagttgtctggttggaaatcagattctactttgaccattgtattgtttgatgcagaaaggtcagctgaaccaccccagaatgatggcacttgtgctgagatttgttggatagcttgttgacttgatgaacggctagcaaggcttgtaccaatttcgaaatcttcaagtgtcacgtcaactggtttgttagcgaatgctgctttgtattcagcggctaattctggataagcagcttcgtattcacggaatttagtatcccattcattttcagcagcttcaccacggaatttgataccaacttcaaagcgtttagccacctcttctggtactgtgaattctggatattcccaaccgtaagattttttagcgtaagcaatgccatcaacgccaagaggggcaccgtgaacagctgatgttccttgtttttcagcaccgaaaccaatgattgttttcacttcgataatagatggtttttcagtttcagcttttgcttcttcgatagctttagcaatcgcttcaaggtcattaccatctttaaccaaaatgtgttgccaaccgtaagcttcaaatttacctttgatatcttctgtgaaagcttttgatgttggaccgtcaagtgaaatgtcgtttgaatcgtaaagaaggactaatttgccaagtttaagatgtccagcaaggctggcagcttcttgactgacaccttccatcaagcaaccgtcaccatgcaaagcataagtgtagtggtcaacgatattaaatcctggtttgttaaatttagctgctaagtgagcttctgccattgccataccaacagcattggcaatcccttgcccaagaggtccagttgtagcttcaacaccgtctgtatgattgacttctgggtgacctggtgtttttgaaccccattgacggaaattcttcaaatcatcaatgctaacattgtaacctgatagatgaagaaggctgtataaaagggcagaaccatgtcctgcagatagtacaaaacgatctcggttagaccaagaacggcttgtcttcggattaacattcattacatgattccaaagaacataagccataggtgcagctcccattggaagaccagggtgacctgaattagctgcctgaatggcatcaattgagagcgtacggacagtattgactgccaactgatcaatagcatcaaatgtcatgagtgaaacctttctgtttttaaggacttatagtattattgttcggattctattatatcataaataattagagtttttaaaacaaattattattcgactttatttttaaacgtttcccagtctttagtaaagttttttatgccgcttgtcgtcaaagggtgtttggtcattttatcaaaaacagcatctggaatggtagcaatatgagcacctcgtttcgcaacgttctcaacatgaactgtattacgaatgctggctgcaatgatttccgtatcaaagccataaaaatcaatgatttctcgcaaatctgaaatcaattggtaagcatctgtgccgatgtcttccagacgtccaacaaatggactgataaaggttgcaccagctttgatagccataagcccttgagataccataaaaataagagtgacgttggtcttaatgttttcttttgaaagcacattgactgctttcaacccttccattgtcatcggaattttgaccacaatattatctgcccatttagcaatatcacgcgcttcagtaatcatttcttcagctgttacacctgtgacttctgccgatacgggaccgtcaacaatctggcaaatttcctttataaccgtctcaaaatcacgcccttcgcgggaaataatcgttggattggtcgtgacaccatccacgacacctagttcattaatcgttttaatcgccgaaacatcggctgtatctaagaaaaatttcattatttgtcctatctcctttatcaaatattaaagatacgactctaacaatcatcgtaagtcacgaaaattaagtccgtatcttttaatcatcctaatcaattcagaaagattatcactcaaatgtttttcctgtcatttcaaaataatccttcgtcatcatgtgccatgatttttctatgtcatcatccaaagcaaacaaaccactccttccaatgacataaatatctggattagctgcatcaattcgtttaaacgttttacgactagaagaaccatccatttctataacataagagtaaccttgctttttacgtaaatgacgcaactcaataattttttctaatgtgtcctctaagaaacgttgcccagcaaaaccaggatcaaccgtcatgatggtaattttatccactaatgctatatagggaaaaatagtttcaataggtgtttcagggttaagaacaacacccgcttttaatcctgcctcatgaatttgatcaataagccgaaaagctagaccatttaatacctctgcatgcatacaaatccattcgcatttaatattaattaattcttgaacccaaaatgtcggatcttctaccataaggtgagctgacatgggtaagtcactaatttttctaacttcttgaataaaccaaggtgataatgtaatgttaggaacaaaatgcccatccataatatccatatggtaagattgtacatgtttatttaaaaatgtaatttgctcagtaaatttatctaaatccatacacattaaggatggcgataactctgctgttttcatattaatacttctttcttttacaaaatttcaatatcagctaaattgatttcctcttcgtcaatatcattttctgatgcaaaatcttcagctgttttattttttgcaattaatgcataaactacacctgttacaacaacattcacaatgattgctaaaagcccagtccatggtctagtcatcgttggaagcatcaaaaatccaccaaatggcactgtcgaatctgcaccaagaaccatagaagttgcaccaccagcagcaccaccaattgctgctgcgataataccacgaactaaatcattcatgacaataggaataaccccttcaacaatatttaacactcccattggtacagctgattttaaattttcaatttgttcttgaccataaatatttttgcctaataatttagcaataaaataagctaaaccaaatccaattggagttgaagtgtttaccaattggagagctgttacaggttcgttgacccctgaagccaatagcgtcagtgtaaaagcgtaaactgttttgttaataggtcctccaaaatcaacaatacttaatgtgccaattactaaacctaaaattaacattgaagatgatcctaaaccttgaaggaaattagttaaccaatttgtaaatgctgcaattggaattccgataatgtaaatcatcaacaacccagaaatcaatgatgttaataaaggaacaataaccgtaggcataagcccttttgcccagtcagaaaccttaacattttttaaaatccatagtgctaagaatccagcgatatagccgccaaccattccaccaataaaacctgcactaatagcatttgccgaaagaccaacaacaaatccaggagcaataccaggtttacctgcaattgagaaggaaactcctgttgcaataatcactggaagtagacctaaagcagttcctcccatcgttgcaagggcatcccaaaacgagaattctccttggataagctcactttgtgaactacctcctaacgccataccaatagctacaagaaaaccagcgccacaaacaattggtattaaatatgagatagcagtcagtaagtgtcctttaagattcatcttcttccaaatttctttcatttacttttacctcctagttcatctgtattagctttttattttttagctacttcaacagctttttcaatcaatttatttggtgatttaacagcaatttcagtcggtacttttaaaacttttttatctttaaaacgttccataccagcaatttttacatcaatggctaaaattacaatgtcagcatcatcaatttgttgctgagtcaattcattttcaattccaattgttccttgggtttcgatttgaacatcatagcctgcttttttagctgcattttcaagtttttcttgagcgatataagtatgagcaattcctactgtacaagctgcaactccaacaattttcattatttgttcctccattcataaaaaacagtatttaaataaaagcattaataacatcatcaactgtttttgaattaattagcttttcaacaacgctatcattacctaatttacgtgcaaaaagtgacaaaagttttaaatgttccttaacatcttcattgtcatccccaacagcaaacataacaataactttaactccctttccatcaagggtttcccaaggaatttctgtttgatttatagcgatggctacaccaatttttttgacaaaaggactcttactgtgcggaattgcaataaaatttcctattcctgtttgaccttctgcttccctaacatacaaatccctaataaaattttcaatatccgaaatataatcttctttcagtaaaatgtgactcattttttgaaaaacttcattttttgtctggcacttcaaatttgttattattaaatgacgatcaataatatctttgatttccatattaacctccattatctatttttcttagtttttatgttttaatttttcaataaaatcatctgatgctaaattttttacaaaatctatcacttctgatttatcacttccatttgttaacatcaatgcgataactaaatcaacctgcacaatagtatccgaccaatctacaattgtatgtttaggtttaataattattattttatttctgttaatagctccttcaaaatgcggtaaaacaacaccttgtgcgatttcaatatttcccatcgcttcacgttctaggaatttactttctatctcttgctgacttagggtttgactgtcaatttgagatgctaaatattcataaacttcttgccgattattgaaattttggttagaaacgtattgatataaatcagttaccataattaatctcccttattgcattttggatattctttttatcttcatctgttaataaggcacttacaagaattgtctttacgtttaacatttcttgcagactaacactcgtgataaccaattgaatatctggataattttgtaaaatttctttgatattttgagaagatactactttaacaatatcaagattttgaaaagccgtttcaattttcactttaagcagttctgaaatgccaattcccgatgaacacatcacaaccgcttttatgggagttgggtttaattctttgaaacgaacaaaatataacgtcaaaaagccaatttcatcagcacttaacattgaaaaaccaaattgttctgtcatctccagagaaactttctctgtctgattaaaaatatcagcataacggtctttaatatcatgcaacatattatttttgatataaattttattatctaatcttcttaacaatggactgatatggttcgccaaatcaataaacataggagattgttcatttattgattctgactttgtcatttccatctttttaaaataaaattttgttacagaaacaacacgcgttgaaaattcaattttttgctgatgtgtactaagttgaaatcttgacgaatacaagtattgatagagataattaatttctaaatcatcaatactcctccctaaacgattcccaatatcatttataatctttttactttctttgagaattgagtcatcgtaatctgtcatcttgatatccactacttctgcgttagcgattttacgactagaaatttttaaccgttcaagcataatgtaaagatgagaaaaaatattaacattgtatgggtatggtaaccttgcctgtaaatccgtctcaatttggtcaatttcttccaaaataattttagcaagctctaaatcaaaatgactttggttagtagtattagacaaattgtcaatatcaatcatgctaaacgttggtaccaaatccgctaatgctctacgaatatccaattctgaacctgttataaaaatatagcctgtccgagttgagatttttaaatgaaagggattgagtcgcttttgaatctcgattttatctttcataataacggaatcactgacataatactcttgtgctaagtcatatataagtaattttttaggtgatatcgttaacaatctctccaaaatttgaagttgcctactagctggtgtaaaatcattttgcttagaatttattaaagtagcataatttttaagtctattaagtttaaaaccacgtcctctcttttttatgataagttcatcaggaaaatagttttgatttatttcctttacaagacgataaaccgttttttcagataaattcaattgttcagataaagattttgccgtgatataatctgaattctgatgcaatactgctagcaatctatcaaattgtaattgttttttattcatcttcattttcctttcacacttattattgtatgcgttttctaattataacaaactccttttagtgtccactttaaaatggacatttttccttttcattgtacacaaaaatcccagtcattactgactgggattcctatcttacgaatttgggtcgtcaaggcttctgccatgcaaaccacgttcgcgttgaagttgttttagtttttctggtgtcacatcatttccttcttcatcaacaagtttaatccctgcgatatggtgaagaagtgagcgacggtacccttcaatgtactctttgcgaagctcagcttgttcaactttttcagcacctgtcaaaccaactgtttttttcttacgcgcaagttcattaatgcgttgaatctttttttcattcatgagtaagactcaccaaacgtataaaatccatagattctacacgctttttcctttcttataatttaccaaatcagaaaatcaattagctaatacacctctaaaatgacaatgctaacttagcagtcattagcaaaattttagccaactgtgtcaggagcggcaagcgaaatgccacttcttatttggtattcaatttgttaaatgctgctacgctgctagcttttgcagtcaattcagcaaggatagccaagcgattatttttaacagcttcattatccaccattaccattgtattgtcaaagaatttgtcgataactgggcttaaagcgaataattgtgccaatttatcactagcgctacctgacaagttcaattctgctgcagcttgtgccaaagctttttcttcatcattttcaaacaagcttgcatccacagtcacgtcagctggtgctttttcagcaagattgaatacacgtgaaagactttcaacggcggctttataatcagcagctttgcttgcttcaacaagagcatcagcagcttcaagcatttcagccacaacaaagtttgaaccagcaagaacagcttctttaatatctttagaaactgatttgctcatcattttttcaacacgcgcacggatgaaatccataacttctgctttgtgttcataagtcaagctatcaaatgacaaggcgtaaaggttgtcaatcaattcatccattggaattttcaaaccaaaggcatccatgatacgaacaacaccagcagttgcacgacgaagagcatatgggtcatttgaacctgatggaatcaagccaactgagaagaatgacaagatagtatccaatttatcagcaagtgccaaaagagcaccaactttagtttctggaaggtcaccgtcagctgaatttggaaggtagtgttcacgaatagctgttgctactgcggcatcttcgcctgcaagaagggcatatttttcacccatgataccttgcaattcatcaaattcaccaaccataccagtcaataagtcgaatttataaatttcagcagcacgagcaagagctttgctttcttcggcagaagcgccagctttttcggcaaggtaagctgcaattactttgctgcgtttcatgtgttcagaaagtgaaccaattttttcgtggaatgtaacgttgtcaagttttgccacaaggtcagcaattttaagtttttggtcttcacgccagaagaattcaccgtcttccaaacgagccacgagcactttttcattacctttaatgacattttcaaggtactcagcattaccgttacgaactgagatgaagtttggcattaatttaccagcttggtcacggacaacaaagtaacgttggtggtttttcattgatgtgacaagcacttcttctggtacttcaagatatttcgtatcaaagcttcccataaaagcagttgggtattcaaccaagttaaggacttcgttaagcaattcgtcatcgatttcaacttggacgttttgtgctttttcaatgtctttgatttggttaacaatcatgtcttgacgttctttagcgtcggcgataacaaagactctacgcaagtcttcttcgtatgaatcagcgctagcaatttctgtttcatgaccaaggaaacggtgtccacggctaacacgacctgaatgaatatccaagaaatcaaggtcaagagcttcatcatcaagaagaacagtcaatgtgtgaacaggacggatgtattcaaatgtgttatttgcccagtgcatgtttactgggaaagtcattgctgacaagatttctggaatgtcaacaagcacttctttggcagcttttcctgcttcgtgttttgtaacgtaaacatactcttcgcctttaacttcgcggaattcaatatcgtcagttgtcaaccctttaccacggacaaatccttgagccgcttttgtgaagttaccgtcagcgtccaatgcgattttcttagaaggacctttaaaatcttctgttaaatcagtttgcgcatcagcaagaccagtcacacgaacagccaaacgacgtggtgtagagaaagtttgaatgccttcaaatgccaaacgtttttcgttcaaaaatgctgccatacgatcgccaagttgtttttcacttggagtaaccacgtaagctggtaattcttctaaaccaagttctacaagtaaatttttagccattattcagcatcctccttcaataatttttcacgtgttgcttcatcaagcaatgggtaaccaaggcgtttacgttctgccacaaatgttttggcaacgacacgagccaagttacgaatacgagcgatgtaaccagcacgttctgttacagaaaccgcaccacgcgcatcaagcaagttgaaagtgtgtgaacatttcaaaacgtagtcataagctgggtgtacgaggtgttcatccaagcaacgttttgcttctgcttcaaatttttcaaagttttcaagaagcatatcttgattagaaatttcaaatgaatattttgaatgttcaaattctggttgaaggaagatttcaccatatttaacacctggtgcccattcaatatcatagacagaatccacttcttgaatgtaagatgccaaacgttcaagaccgtaagtaacttctgatgttacaggacctgtttgcaaaccaccaacttgttggaagtaagtaaattgagtgatttccataccatcaagccaaacttcccaaccaagaccagctgaaccagttgatgggttctcccagttatcttcaacgaaacgaatgtcgtgttctaggggattaattcctaatttttccaatgattcaaggtaaagttcttgaatgtttgatggtgatggtttcataaccacttggaattggtggtgttggtaaagacggttaggattttcaccgtaacgaccgtcagctggacgacgtgatggttcaacataagccgcattccatggttctggaccaatggcacgaaggaaagtgtagggactcattgtaccagcacctttttcattgtcataagcttgcatcaacatacaaccttggtcattccaaaattgttgcaaagtcaaaataatttcttgaaacgtcaattttttagacatgtatttactccttattttagtaacttgatttgcgacgtcagattgggcaaaacgattatttttgaacaatctgactagtgcataggctaggcaaatcgccatagcgattgccgtttgtcagttcgacgactgccaattaaaatgaggagattactgacattgcctaggtaaaacgtcaattttttagacatgtatctactccttattttagtaacttgatttgcgacgtatcttggaggctaacgtttttccataataaaaaaccgccaacacacccatatgatacctcataaggggcgttaaaacgcggttccaccctattttattacttcatttatctgattttaacttagccttgctaagcgaaagcgccagcgactcacttcagtttcatccgacttccaccacctcggactcgctaagaaacaccatgagactttctctctttaaagagtattttagcacaaatgacttggagtgtctaggttcaaacaaaaaactaatagctgaaatcttgttttcactcatttcatcattcaaaattcaaaggcgagataagctcaaaaattttttcatttacccaaaactaaaagcccaagattgttcatctcaggctctcacgtttaggcgttccaaactttttcgccacctaagtaagttgcttgtaaatcaagttctttgtcaaggacgataaaatcagcttgatgtccttttttgatttgtccgcatttatcatcaataccaacagagatagcaggaataaggcttgccatactaatagcttgtgcttttgaagcgattccccaattaacaacatttttcacggcatcttttagttggagaattgaacctgcaagagcaccatttgatttcaaacgtgctgttcctttttcgacagtaacagggtattcgccaagcatataatcaccatctttgagaccacccgcgctcatgcagtccgtaatcaaggcaacgtggtcataatttttttggtgtattaaaatatcacacgctgacggatgaacgtgatgtccgtcacagattaattcagcataggtatttgggagttcgtaaaccgcaccaaccataccaggttcacggtggttaagtccacgcataccattataggcatgaacccaaactgaagcaccagcttccacagcatttgctgcttgttcataagtcgcatcagaatgccctaaagcaacaatcacatttttttccttagcatgattaataaaatcagccacatcatcacgttctggtgccaaagcaatttttcttaacaaaccttttgaactttccaaccattggtctagttcaacaattgacggattacgcatatacgaaggattttgagcccctttgtatttttccgtaaaatatggtccttcaaagaaaagcccttgaatacgtgcaccgctttcttgacctgcaaaatcagctgccgtacgacaaatatcatctaaagtttcaaatgacgctgtcaaaccagttggtaaaaagctagtcactcctgctcctaaaagggcatgactcatggtttccagagcttctttgctgttatccataacatcggcaccagcaaaaccgtgaatatgagtgtcaactaaaccaggagcaatgctgtaacccgtataatcaatgatgtcagcatcgcttggtacttctgcttgccagtctccaaaagtatctccctcgatagcaagataaccagcttttttcacttgataaggataataaaattcgtctgctttaatatactttgtcatttttaaccgcctccattcacttatattatatgccaaatgattatttttgtaaatggtatataccaaatttatttaacttttttggcaaaaaaaatagaaacttggaagaattccagtttctatttactatataatctaaatttggtcttcaatgactttttcaactaagttcaaagcgtggtcagtaatgcgtgtgcatggtgtgatgaggtcaataaagttaatacctgccaacggtgtacattcaccattattcatgcgtttgatgtgattcttacgaatacgacgttccaaatgcgcaatatctttatgacgttccaccaattcgtcagccaattcacgatcattatcaataacaacctttaaagcatccaaaatcatacgatgcgtttcatggtaaagttggtcgatttccttaactgccgctggtgaaaacgtaatatcttttgaaatattgtgttccatcaaacgaaccaaaccaatactatggtcaccaatacgttccaaatcacgtgatgaatctaaaagacttgaaagaatctcactttcatgctgattcaattgttcacttgataactcaataaggtatttggtcaattcttcatcgacattattaatcgtatcttcaaatttttgcgtcttatcagcgtatttttcattactcgtttctacaaatagaaatgccgcttcaaaagcttgtgtcgcataagcacccaagtgaataagttcttttttagcatttccgagtgcgatagctggtgcttgtttcaacaaaattttgtcgagatagattgcttcgtatttcgctacttcgtcttgtccaggaattagttttgtcacaatataagccaatgttccaatgaatgggaacaagagaatggtattagtgatattaaatgttccgtgggcaaaggctacagtcatcgctggtgttaaatcaaggcttgattgcatccattccattaagcttgtaaatggcaaaagaaggatcataaacagcacagttccaatcacattgaaaaggacatgggcagctgccacacgtttagctgctatattcgaaccaattgatgccaaaacagctgtgatacacgtcccaatgttacttcctaaaagaatcggaatcgctccttgaaggtcaagcaaattaccagcatacaagccctgtaaaattccaataatggcagctgatgattggataagcatggttaagcctgtcccaatcagaacccccataattggcttatcgcccaaggttgctaggtaatcttgaaaagctgaaacagattttaaaggctccattgcatcactcatgatattgagtgcaaagaaaattcccccaacaccaaaaataatacgtccaatgttattcaagcttcgacgtgatgtaaagaacaacaaggcagcaccaacaaaaatcatcggtagcgcatagtctcctagattaaacccaattaaaaatgatgttaccgttgttccaatattggcacccatgacgattccaattgcttgtcgaaggttcaaaagtcccgctgacacaagcccaacagtaataaccgtcactcctgaacttgattggattaaagctgacatggctaaaccaacaagaattcctagaaaaggattactcgtatatttatcaatataataacgaagtctgtctccagcagcctgttgtaaaccgtctcccatgtatttaatactgaagagaaagagccctagacctccaaaaaaattaaaagcaatttcttgccaatttactgacacagttttatcctcaaatattataatttttatcgtaaaaagccgataattccattttaatgtattaaaagcaaacaaacaagtattttttgttctttttctaaaatgataaaaaactgattttttaataatcgatcattttttgaagtttcctttttggcagtataatcgttttaggttaaattagcctaaatttttaagagaatatcgaaaaaaattaatgcgctgtcatttctatgttataatatagaaagatgctctgttaatcacagaagtttaacattatttgacttatcgaataacgctacgttattgaagtagtatctaatttataaaaaggaaaaggagctttcatgaaaacctcaagaagtgaagttacttatctcattcttagcattattttaattgcttttggagctggtatttacctaatctttggtaacaattatgccagcacatcaagttcacaaacaactactgccgtctcatcttcatcatctactagcgaagaagatttagaagctaatgcagaagcattgctcgcagaagcacaagccaatcctacgtcagaagctgttaccaatgcccaagcagccattaataaactttctgatgaaagtaaaaaaacagatttacaatcacaattggatgctgtctctgctgaagtaaccaatgaaagcaatgcggaaacagctgttgcaacggcagaatctgaacaaacaagcgcaaatgtctctgcggcacaagcagcaattgatgttctaacaaacgaaaccgtcaaagaccaacttcaagctcgtttggatgctgtttctaacgctatcgcagcagcaactacacaaagcaatactacttcaggtgattcaacatacagcacttacgataatacttattctgattcgactgtcactaatagcgattcttacggatattaatcattatgtcaatcgggcttgtcttttcagccattggcgcaacttgtttagcaatctcatcttttgccaaaactaagaaaagcatgttgagttggcaactgtctgattatttctttaccatgattgccaattttttgttgggtggctatacgggagccatttctatcagtgtttctattattcgaaatacactcatgattaagaaatgggattcaatttatacaactgttctcctcgttatcattcaagtaacattaggcatgtatgtcaacaatttaggattaatcggctgtttacctttgatttcatcagtatcttatactatcgtttcgtttttgactgatagggtacaatggcttcgctgggtaacggttgagaatatgctactttggtctttatacgacttcaccattaaagcctatcctgctttagttatggacgtggtcatcacaattacaacacttattgctattaaaaaatacagtggcttaaatcgtcatacacaaaacacccaagactgatattcatcttgggtgttttaacgtttattttgtttcgtatcctaataagataccaccatcttctccatagaagctacaaagtcctgaagctttgataaatgtgatatcggcttgagggtatttctctttgattttatcacttagctgttggcaagctttttcattgttggcgtgagtaatcatgactttgccaccttgataaccttctttgaacatttcatcgattgttgcttgaacagcttttttctgacctcttgccttgtgaagaagctctaaagtcccttcgtcactagcttttccaaccatacgaatgttaagaagtccgatgactttaccaatcaatttgctcaagcgaccatttttcaccaagttatccacacgagcaagaataaagagtaatttggtcttagcttggtaagcagtaatcgcttcgaccacctcatcaaagctgagacctttagcaattagacggtttaactctaaaacaatcaagtcaatttcaccgcctgcagatagtgagtcaatcacatgaatattaacatttgggtgttcttcaagaagcatatttttagccacttgagcgctgttttgacttcctgataaatttcctgtaatcgtaatagcaatgatattttcagcgccttggtaggcttgtaagaaggcatctgggcttgggcaacttgattttgatgatgtaggacttgcatacatacttgccatcatattatcgacatctaacccttcatcatccacaaaaatttctgagccaatctgtattgttagagggatattttgaaattctgtgtggtctgcgatagcttcgatatgtttaatatcacagccagaatctgtcacaattttccaagtcaaatctcttttcctccatttcttttgattttgatattatttgacaaacaaagtattttctcctaaaattatatcattagagcctttatcttagctatcaaaaacaatcagacgtcacaagtgagaggattttgtcatgacggaaaaaacaatttcacaaaaatccttgcaaaatttgcaggtgtccaacaaggagtcacgaaaattaacgcgtgaatcacttgaaactgcgcttttacttcttcttgaaaagaaaccactaaatcaaattacgatttctgaacttgtcgctaaagctggcgtttcacgtaatgctttctatcgaaattacaaatctaaggaagccattcttgaatctattttaacgcaaattgttcgccgtatttttcgaggcatcaaaaatttcgatttaaagacacaactctcccaagcgtggcttttcatattgacggaggcgaaaaaggaagccaacgttttacgaatgatttttgaacaacaccttgaaaagctattgacaagtatcgtttctaaacgcttaaaagcttatcaacgtttcaagaaaaagcatgattctcgctacactaattctttctggagcaatgccattatctcggtactctcaaactgggtagccgacgatatgcgaattcctgccgaagaagtagccgctattggtttaccacttttcttatgaaaagaacccctccaaccacgatttggttggagggattttattttgggtgaatcacctaatcttgattacattttttctttgacaaaagtaaacatttgttctaaaatcaaatcataaactatacatttgtttatttttgagaggtggcttatggcaatagaagaaaaattaaatcgtagaactttaaaaactcgattaacaatcagagaagccttattggtgctattaaagcataaggaattaagagacattaccattactgacattgctaaccaagcggaaatcacacgaaaatcgttttatcattcttatcaaaatgtggatgaggttatcgaagaaatcgaaaatgacatcattgatgattttgaaactgtcattgaattgctactcgttccagctgatttaaaaaattttagtcgcattttccgagcattgacaaatatcattgaaacagactacaacgattataatgacttgttgcgtttgggacgtttagaacatcattcgttaattcaaaaattaaagacttctttgattaaggaagtcaatcagattcttcctgagaccttatttaaagataaaagtacaaaagaaacaacgattatttttgtggtgggagggctcattgccatttatgataattggttatcatttccaaatgacaatcgtttagaaaccctttctgcgcaagctagtcaagtgattttactgggcttaaatggtgttttgacggaggaactctaaatgtcgaatatgattgattatctgctttctacgcctaatttttttgagggacgttacatcaaaggcgtggaaagtcttattttctcgcagttaagttaccttcattttgaaatctttgaacaatcgctgaaacttgctgacattacagatgagaaagtcattgaccagttggtcgagcatacttggaatgaagcgttgaaccgtaaattaatcactagtttagccaaacaccctatctggcgacacattcaaattttggataatcaaacacaatttgatgctaattcagagcttcaattttcagctacaaccttcaaaattgctccagacctttattacattgcatttcgtgggacaaattcaacttttgtcggctggaaagaagattttaatctttcttatatgaacgctattccttcacaaacagcggctgttgcatatgtcgaacacattatctctaaatacggcggaacgcattacctaggtggacattctaagggaggcaatttggcacattacgccacaggttttgtctctgaggaaattgccaatcatatcaagcgttcagacagttttgatggtcctgggattcaagtatccatgtatgatttcccacaattgcaactaagaaaaaagaaactgttaaaatttatccctgaaaattccgttatcggacgtatctttgattttgaagagaagaatattgtcattgttaaaagtacggctaagcttatctttgaacatgacctctacacttggttgattcaagatgggcagtttgtctgtgtggataaagcaagctcaatgtctcactttgttagcgaaacaatcgcaactttgaataattctcttgacgacgctaccaaaaaagaatgtcttgactccctttacacgattacgcaaactctggacggcgtttacatggcagatgcaagtagccaatggaaaaagaacattaaattattggttaaaggtttgaaagaagccacaccgagtagtaaagaaagctggaaacaggtagccaaaacatttggtcaggcaggacttagccaccacaagaccctttttatcaaataaaaacctgattgatatgcctcaatcaggtttcattgctatttcaacacataatcgtaaatggcttgggctacgcctgcttggtcgttggttgttgtttcgtagcggcaaagcgctttgacttcgtcagtcgcatttcccatggcaacactgttatcagcaaattctagcatttcaatgtcattagcagcatcaccgattgccattacttctgctggagtaaagccaagtttttctgacaaagctttaagagccgtagcttttgtataacctttcggcatagcttcaaagatgtattcttgactgcgcaccacgctaaattcagctgccaaggcactttctttggcttcttggaatgggtccaaataaggcgctcttgccatatacatggcttggaagataatttctgaactagctttcagttcatcaatgctaacagctttagctgtatcgaaaacaagccctgcatcgtattgaaccaattctggcacttcgcttccaacggcataataatgtttttcgcctgtcaatgtcaagcaaacctctggatagtccgctaacacttggtctaatttgtccaattcatcattattaacttgggcataactgacaagctcccaattcttagtattgtaaatgctgcagccattattcataataatgtattcttcatcagtcaagccaagtcgttcaaaataaggcagaattcctgattttggtcgtcctgtacaaagaacaattttcacacctgctttagcagcttcttgaatagctttgacattttcatcaggaatttttttatctgaattcagtaaagttccgtctaaatcaattgcaattaatttaatcatttctaagtgaccttccgtttaatttttggcaaatgccattgacgccagtaacctatcatacgtaagatggtcagaatcaaaacaagcaaataataacccgaatcgttatggacgattttaaagtaaatcgctagcgctgctaaaattgaccaacctgcataaacttcgcttcgtaacaccccaggttttcgccctgctaaaacatcacgaacaataccgccacctgcaccagtcaaaactgccgcaacaatgactgcactcaagggttgatgcaatttcaccgcatacatagctccttgcacgctaaacgccgctaacccgatagcatccgtcaacacttctgcctttctccaacctttatgagtaatgagatttggaaataccatgataaataacatagcaaccaaggcaaaataaaatgcttgaccttgcgaccaaagcgcactaatgggcaatcctatcaaaagattacgaatggcaccaccaccaaaagctgttacaaatcctaagataaacaatcctagaatgtcaaaatcttcttccatggcaacaatagctcctgaaagtgcaaaagcaatcgttccgataatacttaaaatatcccaaacatctattgtcattttcgttccaaattcattttttttcttactagactagtttatcatttttaacgcaaaaaaaaacagcactgagtctgtttttttatgatttttgaaattcttttaaatttcttttccaatggtgaattttgttcccttgagtgctcgttttagggagagcttgaaaggatttcctgtgacggttgcttgttttttatccaaatcaacaaccactttttcaacgccacgaacagctgacaatttttctgtcactgttttgacacaaccttggcatttcatgccagtaacttcatacgttttttccatgtgaaactcctttgtttatcattaattcagtttaatatattttaggcgaagggcattgaggacgactgaaactgaactaaatcccatggcaagtcctgcaatcattggatttaacagaggtccaccaaatagatataatacacccatagcgacaggaatcgctaagatattgtagataaatgcccagaaaagattttccttgataattttaatcgttaaacgactaatgctcaaggctttcagaacatctgagatttctggtttcatgagaataatatctgctgattcaatagcaatgtctgttccagaaccgacagcgataccaatatccgctaccgctaaggcaggtgcgtcatttatcccgtcaccaaccatggcaaccatttttccttgactttgcaaatcctgaatggcttgcgatttctggtctggtagaacttcgctaataacatttttgataccagcttgtttagcaatagcttgtgctgtcttgctattgtcgcctgtcagcatgacaacatcaatgcctttttcttgcaatttagcgacggtttctttactgtctacttttagcaaatcagctacggtgataagtcctagtagttgtgcatttgccgagatgtaaatcggtgtttgtcctttttgagtcgcagccagcaccgcttcttgactagcggtcaagtcaatctgatatttttccattaacttgcggtttccgacgtaaactgtttgtccgtcaatatcagcctgcaagccaaatcctgttaaggacttaaattgtgtgacctctgtcaaagctaacttatctgcggatgctttttccacaatggcttgactaagagggtgttctgacaatttctcgattgaggcaacttgtgcaagaagcttatctttatcgccttggtaagcaaaaatatcaacaacttgtggtttgccttgggtgatagttcctgttttatcaaagacaatagtatcgaggtggtgagcattttcaagggtatcaccgcgtttatagaggataccattttcagcaccgcgaccagttccgaccataatcgctgtcggtgttgcaagaccaagcgcacaaggacaagcaatgacaagaaccgcaatggcaacttggagagcaaagacaaaggtttgtcccataatcaagtaccagaaaatgaaggtgacaagcgcaatcacgataacagttggaacaaaaacacctgctaccttatccgcaattttcgcaatcggtgctttggtctgctgcgcatcctcaaccaatttaataatttgggcgagcaaggtttcatcaccaactttttcagcacgaatggttagcgccccttgtccattgattgaagcaccataaaccttatcctctgtggctttctcaaccgggatactttcccctgtcaacattgactcatcaatcgccgagtgccctgaaaccacactaccgtcaacagggattttttccccaggttttactaaaatgaggtctccaacgcgcacgtcctcaatcgcaacagcttgttccacaccgtcacggataaccgttgcttctttggctgataatttcaccaatttttgaatggcatctgacgtgcgaccttttgacagcgtttcaaagtatttcccgagagtgattaaggtcaaaatcaccgcaactgattcaaaatacagcatatgcgcgtggtggctatgccccagtataatatgataaacaccgtaaaggctgtaaacgaaggcagccgttgttgccaaggcaaccaacgagtccatattaggatgccctttaaacaatgagcgaaagccattgacataaaaacgacgtccaaaatacatgacaggaagcgtcaaaatcagctgaatcaaagcaaagttcaatgggtgagctgacatgctgatgatttctggcacccaaagccccaccatacttcccatagaaatatagaggagcggtatcgcaaacaaagctgataaaagaaacttatgccacatattctgtgtggcttcactttggcgctctgattgactctttgccgttgtcgggtcaaaaacgctggcgctataacctgcatctgctaccgctttttcaatttctttttcactgactaagtcaggattataatccaccgtcattttctccgttgttagattgacaacagcggagtcaacatgatctagctttttaacagcattttcaaccgttaaggcacaagctgcacaggtcatgccgtcaatgacgaaaacttcttcttttgccatttattttcctttccaatctaaccctaagcactcaaatgctctttacagcgacattgcccagggatgcaattgcacggcacttcttcaagtgcctcttcttttttggacaatagcagagcttgcaagtcgttaatatctgccattgtcatcggcgttgtttccacgagatgtttgataatcgcggtatgcttgcgctgacaaaatttatcaaaaagctcatcggcttgtcgattaatagcttcttcttcagaaacaagtgctgaataaagaaatgatttgcccgatttctgtgttgctagatagcctttatccactagtcgtttcaacaatgttttaacagttgaggctgtccagtctgtcttttgctcgagaatttccaaaatctggctactagttgtttcttctttcgtccaaacaacacgcatgatttcccactctgcatttgaaattgacattgttacctcctttaaaatagctttgatttacatttgtagatttattatacgattatcgtttacatttgtcaacgataaaagataaaaaaatgaaacacattgcaaaaatcaaagcaatctgtttcacctagcgtattattcttatttatcaagcagttgtaagtttggccatttttcctgccaatctttcttagcaaggcgttcacgatagacctgcatccgtttcttatcttctaaaaaatgcggtgtcggttgcacgacaaaattaacaatatcgtcatcaccataagccaaaaaaagttccaactcatcattgttcaatcttgctgcaatggctgtgcaacgctctggatatttgctaacagcatctctcgcattttggtaagggagcgtatttggactatggctgtgcatataaacctgattcttgatttcccattgataggctgggtagcgctgttgaaggccttgctgaagcgccagcgtttcatcataagacacattggcatcataaaaaacgacatctaaatcacttgcttgtgccaagccagcttttcctgacaagacattccaaacatagttgcgtaatgtcccagctgctagccaagaatcttgcaaatccagctctgctattaccctaagaatccccattaactcttcattttgcacaaataacgcttgtaaatccataaatcccatccctcatttctgataactactgataacctcttctaacgcttgcagactatcgacaaagataacctttttgcggtcagctgtcgttaaaaatcctgcctgcaccatctgattaaattgttctttgaggctatcatagtaaccgttcatgttaaaaagcaagcagggcttgtcgagttgcccaacacgcgcccatgaaatagcctgaataatctcttcaagtgtccctggaccgcctggaaatgcgactaaaatgtcgccctcttccattaagagacgcttacgctcgtccatgtcatcaacaatttgcaagtgtgttaagccttgatgtgccttttcacgtttttgcataaaatcaggcatgataccatagactttaccaccctgtgccaatgccgtgtccgccaaaactcccataagcccagttttacttccaccataaaccaaacaatggtcatgttgagctaaccaatgcgcaaatgcgacaacttgttcataataatctggcgtatttcccatacttgaagccaaataaaccgtgatattcatcttttttatttccccatttcaaaaaaagcacttttattataacacaaaagaacccgccaattagcgagttcttaattgtttttctatttttaactgaaatggaaagctatgttattttttagcttccaaatcacgaagcatttggtcaattttattgccgtattcgattgattcatctttgatgaatgtcaaatctggaattttgtacatagtcaagttgcgaccaagttcacgtttgatagttccttttgctttttcaagaccagtttgagctttttgattatctgacgcaagttcagagtgaatagtgtaatacactttagccattgaaagatctccaagcatttgaacatcagtaattgtcacatcttgaacacgtgggtcacgaacttttttttgcaaaatttcgtttacttcacgtttgatttccataccaacacggtcaacacgatgattagccataaaatatcctttctagttattttgatattttttatttttctaaagaagtctttttgatactttccttaagtggtgcggacggaaggttcaatagtccagtggactattgaaggaatccaaggaattccatacctaagttttgagcctaaagtctcaaaacttccgagtagctgaatagtagtagtaaattcagccactttcaccacagcggtaagtatcgtcttgttgctcgcttcgctcgcaaataatcaatcaatagacaagacttgcaaattttagaaattatttcataaaaactaaatttgttgatactctaaagatagctaccaccgtggtaaaacaagactgcagtatgtagctctgtttttactagagaattcttgaaagctagccatcaactgaaagtctgctagagcttaccatatgccattagagactttagtctcaatggttgcgcagtggttgactggcagttcttattttgcttcgcaaaaattgcgaccaacctagtcaactgtgcgggtgtaagacgacgaacctactttttttggggttctgtcttactcccaagcgtttcgacggctaaaactttcagtcgataatactggaagttttagactagtgtaacgtttaggcaatgctccatagagattgccgtacaagtattagtggcttcagccacaatacttgttaacgtttaatttcttccatgatgtagccttcgataacgtcatcaactttaatgtcgttgtagttttcaatcatcaaaccaccttcttggccatttccgatttctttaacgtcatctttgaagtgtttaaggctagcaagttttccgtcgaagataacgacaccgtcacggatgacacgggcgttagcatcacgagtgattttaccacttgtaaccatgaatccaccgattgtaccaactttagaaactttgaaggtttcgcggatgatagcttcaccgatgattttttctttgtattcagggtcaagcatacctttcatggcatcttcaacttcttcgataactttgtagataattgaatgaagacgaatttccacttcatcagtttctgcttgttgacgtgcttgtggtgtaggacgtacgttaaatccaataatgaaggcatttgaggcttcagcaagggtaacgtctgattcgttaatagcaccaacagctgagtggacaactgagactttcacgccttcaacatcaattttaagaagtgaggcagcaagagcttcaactgaaccttgtacatcggctttgatgataacattaacagtcttaacttcacctgctttaagcgtatcaaagaggttttcaaggctaacacgttgtgttacttgacgttgtttcatcaatgcacgtttagcacgttcttcaccagcggcacgcgcagctttctcatcttcataaacggcgaagtggtcacctgccataggtacttcattcaaaccggtaattgatactggtgttgatggttcagctacttttacacgacgtccaaggtcattaaccatagcacgaacacgaccaaatgtgttaccaacaacgattgggtcttgaacgtgaagagtaccttgttgaacaagaagtgttgcgatagcacctttacctttatcaagacgagcttcgataactgtaccaatagcacgaactgttgggtcagctttcaattcttccatttcagcaacaaggagaactgtttctagcaattcatcaatgttttgaccaaatttggctgaaatttcaacgaattcacagtcgccaccccaagcggttgagatgataccgtgttctgccaattcaccgataacacgttctgggttggcacctggtttatcgattttgttgattgcaacgatgattgggacgccagcagctttagagtggttaatggcttcgactgtttgaggcataacaccgtcatcagcagcaacaatcaagattgtaatatctgtgattgacgcaccacgcgcacgcattgatgtaaatgccgcgtgtcctggtgtatcaaggaaagtaattttcttaccattttcaatgatttgataagcaccaatatgttgagtgataccaccagcttcgcctgtagcgacacgtgaattacgaagggtatcaagaagggttgttttaccatggtcaacgtgacccatgattgtaacaacaggtgcacgttcaaccatattttcaggattgaggtaatcttcatctacgaagaagcgttcaatatcagcttcgtcaacctcaacttttttatgagcttcaataccataatcaaccatcaacaattcgattgtatcgctgtcgagggattggttttgtgttgccataacacccatcatgaacaattttttaacaatttcagctggttcgcgtttaatacgttttgcgatttcagcgactgtcataccttcagtatattcaaattctttaggcaattcatggaacttacgctctgttacaggttttggagcattattacgattatttttaccttttttgtttttcttattattattccagttactatttctttgatttctcacttggttttgattattccagttttttctatttttattcttgcgtggtccgtcttcatgctcatgattgtaatcatgtgatttttcaggacgaacttgtttcttacgacgtttatcagcagttggtgcaggatgttctgccaccacagtttgtggagcaggcgcagcctttttaactactgctttcttttcttcagccttagcttttgcctcaacacgagccttttgttcttgctcttttgcagcggttgctttgcgtttggcattttcttgctcatgaattcgattttcgctttgacgtgaatactcagcattttgttcagcttttatagcagcggcacgtgctttaaagtcaacacgtggttttgctggttgctgacggttatcgtggcgattatcacgttgatctcttcgattatgattttgagaattgcgatcgcgtttattttgtttacgattattttgggcattcccttgtcgatcattacgatttgaacggtcatcgcgacgttggtcgttacgacgttttttatcgccaccattagcgcgtctttcagcttcggctttggcacgcgcttcacgctcagccttaaaattacggctttgtggttttgctggtgttgcaggagtagcttttggagcttgtgcaactgttttttcagatgctttttctactttaggtttagctggagtagattgaggcttatctgaaaattttgccacaatgcgtttgacatcagattcttcaacgctagaagaatggctcttaacagcaagtcctaattcttgagcatattcaacaacttccttgcttgatttacccaattctttagcgatttcatataatcttttctttgacaattgatgtcctcctattcttttagttcataagagtcctcattttctttgaaaatccagcatctgctatggctaccactttacgcggttttccaagagcagcacttaattccagtgtattaaacactgtggagacttctactttgtaatattgacatttatcagttgttttctttgtcaaattagcgccagcatcattggctaggaaaataaactgtgcttttccagattgaatcgctttaataactaattcttcaccagagataatttttcctgctcgctgtgctagaccaatcaaatttgacaatctttcacggttattcaagacccaactctcttcttttaactttgtgatcgacgtaagcaattaattcatcgtaaaattcgtcaggaacttccattgaaaaactacgattaaacacttttttgtttttagcttggattgcttcttcattgtcaagcttgatgtaagcaccgcgaccgtttttcttaccagtcgggtcgataaaaatctcgccttctttgttcttaacaatgcgaagcaaatcgcgcttatcaattacttcgcctgaaacaactgattttcttaaaggtattttacgtgttttagccatcaaacacctctatctttctttactctgcgtcgtttgctacaacttcagtttcaacagattcagctgcttcttcaacaggtgcaacttcttcttgtgctacagctgcgtttgcttcacgttcagcttcaagtgcttcgtattctgatgcagatttgatgtcgatacggtagccagttaaatgagctgccaaacgaacgttttgtccacggcgaccgatagcaagtgacaatttgttgtcaggaacgacaacagtcgcacgtttgctgtcttcttcgtcgaaaagaaccatatcaacttctgctggcgcaatggcgttgtagatgaattctgctggatcttcaacccattgaataacatcgatattttcttcgattggcacttcaacaccagctttagcatcgtaacgttttggatggaatttgctaatcactttcttgatgttgcttccaccacgaccgacgatagtaccgatagcatcaacgtttggattgtggctacgaacagcaacttttgtacggtcgccagcctcacgtgaaacactcatgatttcaactgttccgtcaaatacttcaggaatttcttgttccataatgcgtttgatgaattgtgggtggctacggcttacaaaaacgttgacaccttttggattgttttcaactttgtaaacataaacttcaatacggtcatgtgatttgaaggtttcaccaggaatttgatcttggtgtgataattgcgcttcaagcgaaccaaggttaacatagatgaaacgttggtcaaaacgttcaacagtaccagtcatgatttcgccttcgtgttgtttgtactcattgtaagttacttcacgaatttgacggcgcattttttccatgattgtttgtttagctgattgagcagcaactcgaccaaattcagcaacagattcttcaaaacgaattttatcaccgagttcataagctgaactgattttcaacgcatctgacaaactgatttctaaacggctatcaaaaacttcttcaacaacttcacgaacagtgtaaactttaaaatcaccttttttgtcatcgaattcaataacacatgattcagattgaccataacgacgtttgtaagctgatttcaaagactctttcacagcgtcaatgatgtcttctttgttaatgtgtttttcttcttccaaaatacggaaggcttctagcatttctttgctcattgttttcattgctctacatggtcagtagagcgtatcctttcgtctatatctaaataaaatcagattgtagtttgtaaatcttgactacaatttcactgccaaacgcgcttttgcaactgtcgaatacggaatttcaactgtttttttccgcgttttatccaaataatcaatggtcaatgtgtcaccgtcaaaagcaacaaggtccccttggaacaccttaactttatcaatcgctttgtagagactaacattgacataagaacctacagctttttcaagagcttctttcgtttttaacggacgctctaaaccaggactagacacttccaacatatattgctctggaaatgggtctggtttaatcgcatcaagcaaagggctgataatttcagtcaactctgctgtatcatctaccgtaattccttctggtttgtcaattaaaatgctaagcacataatcgctacccattttctcatactcgacatcaaccaattcaaacggctctttaatagctggtgcaaccacttctgtaacaacatcaatgattgtatttgcgtttgcgataagaatcccctcctttatcttcaaaatcaaaaatagaaagttcactacgctcattcacttctacgaagtggacttgtagcgtctcatcgtagaacttcgctcctaatctcatgtaatcactagccttttgggctaaaatgagatttaagcaccacaagaggcgaagtcacaaactccgcctccttctacatattttttattataatagcacattttatttgaaatatcaagacttatgcttgataaagctagaaaacttacccttttccagcaagaatatctgatactttatacaatcctggggaatatgtccgaccgaaaagctttttcgtcaaggcattaaacgtataatggtcatctaaaatcaagacttcgtcatatgtttttaagagtgcaataaagtcatcgtctgttaaattgaaatcatctctagtatcgatattttcattccagaggtaataacttgttgcgctgtcgctgtatgatgccattaaatctaaaaattcttggtcagccgacacaaaattttctctggcatcaacattgacatcccacagataataacgactagcatattggacaaaataactatctacattctccttgtctgctgttacaaccaaaattctatccgttgacgaatcactctgacttccagtaagctgatgaatttcttttgcgacctcgtttgtttcctgattgttattgtaaacaatgctattattttctgacaagaacattccaatggcataaactgtcaaaacaaggctcgcgtattggtacaagcgtttattaaataagctcttgtaagacctagcattacgtttactaatgattttttcatacagacacttgtccattacccatgctaaagccatggtcaaacaaccaaaagcaaagataacgatgctcgaagcatagcgctcaaatcctgctaattctaacgcttcatcagtcggcattgctgtcaaatacatgagtaaaatgccaatatagtaagtcacaatcgaaatatcaacaaatccccatgtcaacaagacaaatttcttatgtttcaaacgaatgccaatcacaataaaggcaatcagcataatcagattgattatcaaaatcccattgcttgccaaactgtcaaacgtaaacaccgatttgacaaaaagagtgataattttttgtgggtcgcctgacagattcccagtcaatacctgaccaagttctgacatggacaccgcatgcttggcacttgaggcatttgggaaattattcgtcacgtgcttttgccaaataacaaaaggaagaaagctgactagcagggtcattatgagcagcactagtgcttttaagcctgctcgtttacgcacaagcaagcgcacaatacaaaccacataagctactaaaacgagagcgacaaagaaaagtccacttactttaacgatacttaataatccaagaattaccgccgtatttagcgacaaaaaccagaaacgattacgataggcaaaacaacctgctatggctgccaaggccaaggctgggagcagaaaatcaaccagcaaattatttaatcgaatagcaacgttgaacgtattaaaaacagcaaacgaagcaaaaatcatgctaaccattaagccacgtcgatcatcacgaagtgctgcaaacatggcataaagagatgaagcaatcaagaagaattgcccgaccaacatactgccttctgaaaagcctacgatagtcgtgaaaaaataaatgaaaagtgaacttccaacaggataggtataataactaataatcgtatcctgctgtgtcggcaaagcattattgatatggaaaaatttcacaatcgttgcccaatgcgtaaaattatcataatgtaaaagcggtgaatgccagagcgttattccaaacaaaagcaaataagccatcattccaagcgcaatataatcaagtctcctaaagcgatatttctttttccataccgcccaaagataataaagactcaaaagacagcctaaaacagaaatggcatacacagtctgcaacataaagcctaacaaactaccaaggtacaataccaatgtaatgaccgaaaatgtaaacacccatgtcaaacgacgattcatcttcacagtattacggaaaaaagcatcataccccatagtaattacaaagaacaacagtaatctagcaatactaatcatactctccctctccattcatttgctaaggctttaaaagcaggtaagctatccaaatccgctaaattggtaacttgataaagcgattcgtctctatcaatatcataggacacaaaagtcaactgaattggcaaatctttgtaggtaaatgcgacattcggttcttttttaggatttgtcaattttccagaaaatgtcatgtaataataatctgtctttctaagctggcgtttttttccagcaacttgaacctcttcattgacgcgaactttcggaaaagctatttggtcataggctgaaacaggacgttcattactttggaaacgttgactaaagttctcaaataaatcatcccatgttgtcatccaagggtctttttccttcggaagattgtgattaatgcggtcataaatgtactgataaaattcgcgcttatcagcttcaggaacttctgaaaattgaacgccgtagcgccaaccactatcaatcgcaaaaacacgaacaacatgaccttttactctcgcatggtaatcacgtgattgcaaattaagcgtcagttctttttctttcggcaaatacaatggtaaatccgtatagaatgaaatccccgtttctgaaatatcacagactctcacttggtaagaatcatcatcaacctcaataaccatagcttcatcaacagtaaaacgctcacttgagcgataaatcggacgaccaagcgcacagaaaatcgcaaaggtcaaattgataatatgataaatcaaccaaaaactgataatacttccataaaaaagctctgaaccaaattttccatagttaaaagtcaccaaaccataaacggctaatccccacaaaacaagataaggaagcgcataaaggtacaacgtccacgacgtatcatttcctttacgtgtcaccttaaattttttctcgctaatgccaaaggactccaacatcatgggaataaacaaatacggagcaaaaatcgtttccacaatttctccccaaacctgtgttcggtattgttttgagacttctcgcattgacaagcgtgtcaaggcgtaacttggcaaccagaataggaacagtagccagatatttgacaccaccacacgcacatggaaaaccgtatataaaatcggcgccaagatatacaacaaccgtctaaagaaagaccaccaataaagatagccattaatataaacaattctttgcccctttgtcaatttgggattaaagaagatattcatattgtagctactgcgaataacgccacgtccccagcgcacgcgctgtttgatgacactcttcaaatctgttggcgttaacccgctagccattggacttttcgtcgaataatttacataaccagccgcagtcatccgaacacctagctcgaaatcctccgtaatggtatctgtcggaaaaccaccaacatcttcaatcgccttgcggaaaataaccgtattagaccccgtataaaccgctgcaccgtgcgaattattgaaaacattaatttctttggaaaagaaatcttgttcgtttggtaaggttgattctgaaaacaagttaaattggaaaatatcagcattgtaaaaactttgtggcgtttgaatcaaaccaacttttgacttatcataatcgtcaccattttcataagcctcaacttgttcaacaaaataaggcacagtttccaacaggaattcacgataaggaatcatatccgcatcaaatgtcgccaccaaaggtgatgacgtctgacgtaaagcattattgtagtttcctgatttggcatctttattatccgccaaaccaaaataaccaacaccaagctcatcagacaatttggcaactgctagacgattggtatcatcacagacgtagatatgcaccttagacttatcaggatattccataaaagtgcaggcattaatcgtcttataaagcaactctggatcctcattatgcgttgcaatcaaaacatccacatctgggtaacgctccttagcaatctcaggcttttcaagctcaaagtccttttgcttattccaaatgagaatgtatcctgtaatggctgaaactacctcacttccccacaataaaatcccaaaaatcagcgcaaaccatgaatcatgccacggaatagtcgccaccaaacgccaagttaaataaaaggcagtcgttacaaatgcaacgaaatagagtatcctcttactggttttcattctcgcctccactaaaaatcaaatgtttttgcacaaaataactgacaaagaaaagtgtaccgtcaactaaaatcttcaccactgaaattggcagcatcgtcaaggcatttcctagaactgttaccaataaacttgacaaggcaatctgtactaccaccaaagtgaagtattttatcgcactatttgattgaccttgtttaaagaccactttatgattcaaggtgaaattaacaacagatgatatcgcacgcgctaaaatcgaagctaacgtcaccgcactaaaactcaatccattaaacaaagaaattaaaatcgtaaaagcaacaatatcaaccaagaaggaaaacaatgatgaaaaaatgtacttgaagaaaaccttgtaaattctaatcgagtcacgaatcacatcaaaatgcgacgactgattttcatccaaataaatcgttgcaatgccaacttcacaaatcgaaatattgtcctcttttgcctcaagtaacatattcatctcaaattcataccgttcaccctccacggttaagagttttggtagccatgacataggaatcacacgaagccctgtttgcgtatcagaaacgttcatacctgtcatagctcccaagacgtctcttgtcaataaatttccaaatttactacgtaaaggaacagatttttcaaatgttctaacacccagcaccaaactatcaggatgttgcaaaaattcagccaaacatttcatcatgtcttcgtaggtatgttgaccatcagaatcaatcgtcacaattcctttggcattaggaaaattgtccaaaatatatgaaatagccgtttttaaagcacgaccctttcctttattttcagcgtgtctttgcatatgacaagcatagttactctgtgctgttgcaaataacgacgcaaactccaccccactaccgtcatcaacaagaacaatgtcaaatgcgtgattttccttgtcacgaatatttttcaaaagttccaacaaacgttcatcaggttcataggcaggaataacaataacaacatcttgatacatcatccgctttatcctttctgacttttattttcgtacattttcttatccgccattgcacaaaaatcaacgaaggttttatgtgattgataagaatccgtataagcacctagagatgctgtgactcccatatctttgacagtcatttctgcttgaacaagttttattaaaaattcagcttgattttcagaaacttccggtaataaaaccgcaaattcatctccacctaaccttgctattacagcactttcaggcattatcttcgttaaaatatcaccaaattcaattagaatcttatctcccgtagcatgtccaaaggtatcatttgcttccttgaatttatccaaatcagatataataaccgtaatttgttcttctttacgcgtcagacattcctcaaaagcaagctcaatatatcgtcgattatgaacccgtgttaaaacatcttcgtatgccatcctctgtatttcaagttcatgaagtctctgctctgtaacatcaagaacaaaacaaaaaacaccaatcactttttggcgattgttataaatgggagaatacatattttgccagtaaagcgttttgtcgcctgtcttaatagtatccataaatgtaaatgtttcaccctttttcgcacgatcaacatttgcttttaaacgcgcagcatcttcactagcaagataattcattggaaagtcaccaattttgggagtgaaataaaagatttcttccatgagccgaatatcattcttattaaccgcaataaaacgataatctaagtctacagcatagacgttaataagtttcgaactctgtaagataaagtgggatagcatatgctgtcttcgattaaggtaagatgctaaggtccaaaggactagtattcctatcaagattgctaaaacgatgggattatcatggtcaatcaaaacatcatcatacactaagcgcattaataacattaacgcagcaaaaatacttaagtacgttaacaatctttgatgcttgattaaaaaatcacttacttttcctaataccattacagcctcaccattctaagtagttttactaccagcagcttgctcccaaacattcaaactatagttgttattttttaaatatttcttaactccggtgagagtttttcccattcataaatttcaataacattacgataattgagtacaaaaaaatgccctgattttttacatcattatctataaaataaagggcgttttttactattcaattttgtaaggagaggaggggattcgaacccccgagcccaattggactacacgctttccaagcgtgcgcactcgaccactatgcgacctctccgaaagaagcttagataaccacttctttaaccagtccactaattactgaaattgtgcttcaacacggtaaatgacttgtcctttttgagaaaatttttcctcatattcagtcatgacatttccctcaaaatcactagcatgcagatctaaccaaacttgttttaaaatcatgccatattgtgagaaacttgccaaactatattcaaacaaaccacggttatccgttttgaaatgaatttcaccttgttctggtaaaatttgacggtaagtatccaagaatgtcttataagttaaacggcgtttttcatgacgttttttcggccatggatctgaaaaattcaaatacattaaatcaatctcaccatctgcaaaataatttgtcaaatcagagccatcaactaacaacaaacgaacattcggtgcttgactatctaacactttatctaaagcatagctaagcacagatacttgaatgtcaattccgatatagttaatatctggattttgcaaagccattccagtaatgaaagctccttttcctgaacctacttcaatgtggatcggattatcattaccaaatacttcgcgccaacgtcctttggcttcttctggatttaaaataacatagtgtgggttattttctaagtgctcctcagcacccttacgttttctaactcgcattatttctttttactaactaactccctaaattttcgtaaaccataaatttcttgattcacgtgctccatgtcacgcttatcaaaacaatttaaaatttgtgaaagatatgagaattgtccgtaccaaacaattttttggcgtactttctcattatccttgtaaccataataatttaaccactcatgccaacgtgaatatggaatgtaatggctcaaaagaaaggctacatcatacattctatctgtcaatcgcacagaatcccaatcaacaaggtaaatcataccactagtcgtaatgacccagttgctatgcttaatatcaccatgcacaatcgttgcaacttctgaacgaaactctggtaaactgcgttttaattctttgacgatactttgcagataagtattttcttggatttgaagtggggcatttttttcccaatccaccaacaaatcataaggattttcaatcttataattcaactgtaacagctgattaactagagggcgtgatttgtgcaaacgcaaaagaatatggacaatttgtttactccccatatcctcttttgtcaaaattctaccatcaagccactcttgagcactcattgtatcaccattgccagttcgacgtacccacaataattgtggtgcaatctgttctttagcaagtgcaggcaaaatcggtgtcgtattcaatttaataaagattttttcaccgtttggatattgaccaataaaggctttaccactcttaccttgcaagggagtcattgtcaattcttgatccgatactgtcacctgtccgccctccttttctttcgtgaatcgtttgtttactcctattttacttgttttacagcgcctagtcaatcatcttattgattttgtaaggaagataccattctgtaataataaccgttaccaaaaccaacaagcccgctgcttgccaagaaaacgttaataacaactccaaaaagcccagtaaatacgataattttttcaaaaatgtctttaaattagccgccttttgcttttcagaaattggataaagattggtcaaatattgataatcaaaatgttgggatagggttaataattgaaaaagtaataaataattaaagaccaaagccaagccaactgctaccaagcgattggaaataaagataagcgcaagcaagctcaatgcgagtaatcgcaaggttaaagcaaaataatctgaacttcgtaaaaacgcacgtaggtataaatttgaccatgttttggcatgtgtttttttgaccaaaccaagcaaaccatccaagtacgaacgacgtttcacactagctgaaattcccttaaccgttgtgaaaagtgaaaagaatttaagcactccttgacgacgttttgcttcataagaaatggcagcatcccatgaaaattttcctttagaaaagaataccttgcttttttctttcattacaagccatttcacaaccgctaaagcaagcaataaaatgccaaaggtaaccattgaaaaacctagtttaaagaagataggagctaataagacaagaattaccgtttgcacaatcgtccaaatcacaaaagcacgacgtcttgcctgtgatagccattgcaaaatctcaatttcttttggcaaatagaacaatttatcaggtgcttccaaataagtcgcaatcttcccaaggctaagcaaaacaaggataaccaagaccaaaatcacgtcaataacgactgtctgacttggaaactgacgtaacagctggctgtattgaaccatcagaaaacctgttaagaaaaccaagactagcacaaaatggtcattaaagacataacgaagatactttaagcattgccctaaaaaagcactacggcgcttttgaaaaacttctttcatatcacacctctttagtcaatgacatataaatatcattaagcgttgctgtctcatcaccaaaagcttcacgtagctctgctaatgtaccagtcgcacgaatttgcccttgatgcaaaatcacaaaacggtcacacatcttttcagcagcatccaaaacgtgtgttgacatcaaaatcgcttttccttttgccttttcttgcgccaataattctgtcaaatcagaaatcgctaatgggtccaatcccaaaaagggctcatcaacgataaacaaacttggattgaccataaaggcacaaataatcatgaccttctgcttcatccctttagagaaattaatcggaaaccactctaatttatcagataagcggaaaagttccaacaattctgtcgcacgcgccatcgcctcatcataattaaggtcataagccattgcaaccgtttctaaatgttcacgtaaagtcagttcttcatataaacttggcgtttctgggataaatccgattttcttacgatattccgcctgatcctgcgccaaagtcaaaccatcaatcgaaatttgcccttgatatggcgttaaaagtccgataatttcattgattgtcgttgacttaccagccccattcaaaccaattaagccaataagctcaccgtcaccaacttcaaaagaaatattttttaagacagggatgttaatgtatcccccagttacattttcaatttttaacataagatacccacaaatttttgatataataattataacaaaatcaaaggattataggtgattcaaatggaaaattgtatcttttgtaaaattatcgctggtgacattccgtcatcaaaagtctatgaagatgaccaagtacttgcttttttagacatttcacaaacaactaaaggacatactctattaattccaaaagagcacgtccgcaatgttcttgccatgtctcaggaaacatcagaaatactctttgctcgtttaccaaaagtcgcacgtgccgtccaaaaagctactggtgctgtcggcatgaatattcttaataacaacgaagaagtcgctggacaaactgttttccatgcacacgtccacctcatcccacgttatgatgctaacgacgaagtcacatttgccttcacagaacacgaacctgactttgaagcgcttggtaaattagcagagcaaatctctcaagaggtaaaagcatgaaattaagacatcttatcgcactcggcgtggctggttgcgcaggatatgcagcttatcacgtctataaaaaccgtgaccaatttaaagcagaaatcgcagaagctgatgacattagcgaaagaatttcaacggacatcgcaaaaattcgtcgcagtattgacgacattaacaaccagcttccaacacttcaaacaatcagccaagatttggattacaaacgtcgcctttttgaacaagaaaccaatagccgcttagagcaaatcaaagcaacgctagcaaaatatcaagaagaaaactaagcaacaaccaccaagctaaaaggcttggtggttttataatagccactgataaggcaactaatcagaccaattttttcaaattaaagaagctgagatttcatctcagcttctattatcttaatatgaataagcactgtaatcagaataagtatctgtgctatagtcgctataaccaccactattgtaatcactgtaaccactgtcatagccgctagaactactataatcaccatagccactatcataagaacttgatgttccactaccatagagattttcatagagaacagctgttgtttgcaaggttgtactttcatccaaaccaagttgtttcttgatattattttgaatttcaagcagatgatctgatgtgacaatctgatatgatgtaccattaatcgtcgcatcctcaccttgtagttggtaggtttcaatatcactcaaagcatctgtataaccaagtagacttggaatcgtgctagatgaaatttcaatatttgtttgcatattgctacttacagcagaaaggatttttttatatgaacttacactatcaagcgctaaaattttcttcaagactttttgaatgacttcacgttggcgtttttgacgtccatagtcaccttctgggtcatcataacgcatacgtgcgtaaaccaaagcttgttcaccattaatcttgtgagtaccaggttcaacggttgctgtatattcaggttcattttcagcaatcgaaatggcaaaatcgaaattattggttacggtaataccaccaacagcatcaaccaaatctaccaaaccttgcatgttgatttggacatagtaatcaatagtaatatccaacaaactttgtaccgtcatgatagccatttgcgcaccgccagaagcatatgcggcattcaatttagcttcaacgccattcatatcattatcttctggtccagtaagtgtcactaatacgtcacgctccagactagtcatcgttgtttctttcgtttcaggattaacagttaccaaaatcatagagtcactgttaccttcccacgttgacgtacgttctgaatctcccgtatcaacccccattaaaaggattgaaataggttttgtttgctcaatagcgtcactactagaatcagacgtcttgtagtctttgaacgtttttgaaagctcacttgttgagaaattgtaagctgttgtaatataaacacctaaggcaacaattgttgttacaaagattgctgctatcattagcagaattttttttccgagtttcatttgtttacttttagtctatcaacctactcatcaagtagacgtcaagaaattctccatctttagtttttgcgccacgttctttcgtagcttcaatcttaaaaccgaacttttcataaaggtgaacagctctgctatttctagcttgaaccgttaactccaaacggcgaatcattggcgtttgctctgcccaatcaagagcaacttccattaaaagcgaaccaagtccgtatccccaatatttttcttgcaatgcaatgaaaatatctccaatatgattagtttgtggtgagttcgtgctaacaatattaagcactcccgcaagctcagagccaactctagcgaccaaacaaatttcatttaagacttctgcacgtgtttgtaaaaaagtctgcatatcatcaagagataagttcttctctaaaatgataaaatctgtttctgcatttacttgattgagtaaatcaatcaaagctttggcatctgaaggctgcgcttcctcaatgataacttcctgctcagccacgttcaatcgcctccaaaagcgcttggctccgtgaaccgttagcatgtagtgttatttcacgcccatctcctgacggcgtaataacaacctctagataatcaccaagcaagtcagtctcaagaagctcaccccactcaatcacagttacgccatcaccatacaaaaaatcatctaaatcgatagaatcaggatcatttccgatacgataaacatctaaatgataaagtggtaaacgtccttcgtattcccgaacaatcgtgtatgttggacttttaatcatctggtgaatatcaagtcccttagcaattcccttggttaaggttgtcttaccagcaccaagatttcctgttaaaacaagaatatctcctgcctgtaattcttgaccgagccgatttccataagcaatcaactcatcttcattgtgactataaaacatggaactattatatcaaaaaactggcactcttccaagtctcgcccgatttttctcccattttcattataaaatttcaaaattctaatcctacaaatacctgaaaacagctactcaataccgcctaaaaaggctaaaaaagctggaggaatttctcctccaactttcgtctaaaactatattttttacaaaattgccaagcaaacaaagttaagaatgaacaagaagtccaaaatccacataacaaggtgaatatctttagcttgacctttcacaattttaactaatgtgtaagtgataaatccagctgcgataccgtaagtaatgctataactgaatcccataaagattgatgtaaagaaagctggaatagcttcgctcaaatcatcccatttgacatttttaagatttgaaagcatcattacaccaacgatgataaggataggtgctgttgcttgtgtaggaacgattgaaacaagtggactaaagaaacttgaaatagcaaagagaacagctacaacaagagcagtcaaaccagtacgaccaccagcaccgatacctgctgctgattcaacgtaagttgttacgtttgaagtacctgcaatcgcacctaatgttgtaccaaccaaatcagaataaagggcacggtcaagtgatttagattctttattttcaccagttgtggcaacaataccaactttttcaccagtaccaacaagtgtaccaattgtatcaaaaatatctgtcaatgagaaagcaagaattgccattaaaacacctgggatacgtgaaacatctgagaacaatgaccccaaaccttgacttccaagagcaacaccaaaaatttgtttcaaatcattgatagaagcagataagttagtcgctgaccagttgattgaaccgaggtcaacaacacccatgaaaataccaacaatagttgttacagcgattgaaagaataacaccaccacggatacctttaacgataaagaagatagtgatagcaaggccaatcaatgcaaggataacagttggtgtgttgaaagcaaccaaacctggtgtagctgaggcattagctgtgattgaagcgagacctttgtcagcacctgttccagatactgtgtatgttccagcgtcaacagagaatttcaagaaaccagcatttttaataccaacgtaagcaaggaaaataccaatacctgctgaaattgctgatttcaatgttgcaggaattgactcaataatcaatttacgaactttcgttactgtaataacaagtgaaataagtccacaaatgaataccattgctaacgcttcttgccaagtgtatcctaatgaaaagacaactgtataagtaaagaatgcgttaagtcccatacctggtgcttgtgcatatggaagattagcatagaaagccatcatcaatgtaccaacaacagcaccaataatagtagcaaggaacacaccttgtgtaggcattcctgtttgtgagaggattgacggattgacaaacaaaacataagacattgcaaagaaagttgtcaaaccagcagttacttctgtacgaacatctgtaccatgttctttaagtttaaaaaacttttccattttaaaatggtttctcctttgataaggttaataatagtcgctttttgttctatttccgaacgacttacatattttaccaaaagattgttcacttttcaataactttatttgaaattttctcggtcaagaaataccagacataaaatctgaataaatgtaaaccctaacacaaaatgaacagcatcccagctaacaacgtctagaatttcactaataacagtttttggacgtgtgaaaatatcccaagaattcaagcgggcgtaacgtccgatatggatagcaaaacttgaaataaatgacaaaacaccaataaaaagcaaccgtaaataataattttttagtttaaaagtaagaacaatatttttaacactttcaatcccacaaagaacaccaaacaaaatactagacacatatagcatatacaaaatcaaactcgttttgttccacaatactgtacttgtaaattgcatatgaacaatatccgttaacatgtagaaggtattaggataaaaaaatagccacagaatagctcctaatccccttacaacttttttacttatataataggaaacaagtgaaaaatcaagagccaccaaagctaaaaacatattccaaacaaggtctggtccttcaagatgataatggtaaatgccaaaagcaataaccccgaaaaagagatgaataaaaacaattttcttagccatatttttctcctttctttaaacagacattatagcaaaaaagagcttaaaaagccctttaaaactaacaaacaaagtaagcataaccacaagaacaaagcgataaaatactgaaaaataaaagccaaggacaattccttagcttaattaatcattatccaacaaaacaaacatcatcacctgcacaaccattaaccctagaataaatggcatattaattgttgtcagagcttttgagacctgctcaaaaatattgaggtgttgtaataaaatcactttccaagtaattcccaatgttcgtaaaatctgaaacatcagactagcaaaaaatgcaattcccattacaaagaatacttgaatgtaatgatttaatttaaatgcatttaaaatcaaccgtatgctcaatgttccagcaatcaaggcaaatacaagaactgccaaataaagcatgaaagatttcatcccatttgatgtccataaagcggcagtatcccaagacgtgtcagccacactaaacaaaacgttcaaattataaggatagaaaaagcaccaaaatattaaaaccaagccacgtaacaaaacgtgtttaaaataatagaataaaaatcccatctccaaagtcagcaacgaaaacaagacgtcattcatcaagccatcaatgttagactgataataaacaactcccaaaataatgcctagggcaaataaatgactccaaacaattttatacatgaatccaaaacctcattttttattactactattatagcatagaaatcttttcttttaatttaatagtcttttttgttataataacagctatgacaaagaaaatgattgcacttgatttagacggtacattgttgcgcagcgacaataccatttcagattataccgttgaaacgattaaaaaaattcaaaacaaagggcataaggtcgttattgcaactggacgtccttatcgtatggcacttgaacactatcgccgccttgaattatcaactccgatgatttctttcaatggctcgctcacacatttacccgagaaaaaatgggaatgggaacatagcgttacgattgacaagcaatacctgcttgatgttcttgatatgcaacaaagcattgaagcggattttattgccagcgaataccgaaaaaaattctatattagcgcccaagaccacaatcgcgtaaatcctcaacttttcggtgtcccagaaattactgaaaaaatgtcaatggacatcaaaaaaatcactgaaaatccaaacggcattctcatgcaaacacgtcaccaagataaatacgctcttgctgacgaaatgcgtaaacacttcaattacgaaatcgaaattgattcttggggtggtccgcttaacattctcgaattttcaccaaaaggcatcaacaaagcttacgctttgaaatatctcctaaaagcactcaatatctctcaagataacttgattgcttttggcgacgaacataacgacaccgagatgttatcatttgctggaacaggctacgctatgaaaaatgcaagtgacattcttctgccatttgccgataaacaaactgaattttctaatgaagaagacggtgttgccaaagaacttgaaaaaatttttctataaatttatgaaaaaacttctttttggaagttttttctttttttcattcttttcaaaacgttttcacggtattttcattttttgatcgtcagtatccgaacaaatgctatttttctgtcaaattcagtcgtcttatcctgcgcgtttctgaaaatttttcatgatttgtgctattttttctcaaaaagctattgcttttttattgaaaacgttttacaataatatcgttcttaaatttccttgaaacggaaaagaattgccaagttcgcttggaaggagattattcttttttgtttcaacgaaaaatatttaaaaggaggaagaacaagaatgggtatcggtattattattgccagccatggtaaatttgctgaaggtattcatcaatcaggttctatgatttttggcgaacaagagaaagttcaagtcgtaactttcatgccaagcgaaggaccagatgatttgtatgcacacttcaacgatgctatcgcacaatttgatgctgatgatgaaatcctcgtactagctgacctttggagtggttctccatttaaccaagctagtcgcgtgatgggtgaaaatccagaccgcaagatggctatcattacaggtctcaatttgccaatgcttatccaagcctacacagagcgtatgatggacgctaatgcaggtgttgaacaagttgttgcaaatatcattaaagagtctaaagacggtgttaaagcacttcctgaagaactcaacccagctgaagaagctgctgctgcgcctgctgcacaagctgcacctcaaggtgctatcccagaaggaactgtcatcggtgatggtaaacttaaaattaacctcgctcgtatcgacacacgtcttcttcatggacaagttgcaacaaactggacaccagcgtctaaagcagatcgtatcatcgttgcttctgatacagtctctaaagacgaattgcgtaaaggtttgattaaacaagctgcgccaaacggtgttaaagcaaacgttgttccaatcaagaaattgattgaagcttctaaaggccctcgttttggtaacacacatgcacttatcttgtttgaaacacctcaagaagctcttgaagctatcgaaggcggtgtgccaattaaagaacttaacgttggttcaatggctcactcaacaggtaaaacaatggttaacaacgttttatctatggataaagatgatgttgccacatttgaaaaattacgtgaccttggcgtaacatttgacgtacgtaaagtccctaatgattctaagaaagacttgtttgatcttatcaaaaaagcaaacgttcaataatatgagctgtgtttaacataaaaagtaagcgtttctatacattaccgattatcataaacacaaactcaacatcctgtttttatccaaattaagtaagccgtggtttctggcttacctattgcacattgaaaacttttataaacgaaaggaactagaataatgtcagttatttctatgattttagtcgttgtagttgccttcttcgctggtcttgaaggtatccttgacgaattccaattccaccaaccactagttgcctgcacgcttatcggtcttgttactggtaaccttgaagcaggtatcatccttggtggttcacttcaaatgatcgctcttggttgggctaacattggtgccgctgttgcgcctgacgctgcccttgcctcagtagctgctgccattatcatggtcaaaggtggagatttcacaactaaaggtatcgctgttgcaactgcgactgctatccctcttgctgttgctggtcttttccttacaatgcttgttcgtacagcttctgttgcccttgttcacggtgctgacgctgccgctaaagaaggaaacatcgctgctgttgaacgcactcacttagttgctcttttccttcaaggacttcgtattgctgttcctgctgcacttcttcttgcagtaccaacatcagtagtacaatctgttcttaacgctatgccagactggttgtcaggtggtatggctgtcggtggtggtatggttgttgccgtaggttacgctatggttatcaacatgatggctacaagtgaagtatggccattcttcgccatcggttttgcagtagcagctgtctctgatcttactcttatcgcacttggtacaatcggtgttgcccttgccttcatctaccttaacctttcagaaaaaggtggaaacggtggcggaactgcttcaggttctggtgacccaattggcgatatcctagaagactactagaaaggggcacaaacatgactgaaaaacttcaattatcaaaatctgaccgtcaaaaagtttggtggcgttcaactttccttcaaggttcttggaactacgaacgtatgcaaaacttaggttgggcatatgctttaatccctgccatcaaaaaactttatacatctaaagaagaccgagctgctgctcttgaacgtcacttggaattcttcaatactcacccatacgttgctgctccaatcatcggtgtaactcttgcccttgaagaagaacgcgcaaatggtgctgaaattgatgacacagctatccaaggggttaaaatcggtatgatgggacctcttgctggtgtcggtgacccagtcttctggtttactgttcgtcctatccttggtgcccttggtgcttcacttgctatggcaggtaacattgttggtccactcctattcttctttggatggaacatcattcgtatggcattcttgtggtacactcaagaacttggttacaaagctggttctgaaatcactaaagacctttcaggcggtattattcaaaaaatcactaaaggtgcttcaatccttggtatgttcatccttgctgtcttggttgaacgttgggtatcaattacatttactgttgatcttcctgcaactcaattgtcagagggtgcttacatcgaattccctaaaggaaacgtaacaggtactgaacttcaaggtattcttggtgatgtcgctaacggacttagcttgacttctacacaaactaatacccttcaaagtcaattagactcattgattcctggtttgatgggacttcttctcacattcttctgtatgtggttgcttaagaaaaaagtttcaccaatcacaatcatcattggattgttcatcgttggtatcatcgctcgcttcttcggaatcatgtaataaaagaaaggaaggatttcgatccttctttttttattatgttataatagactaaaagcttatcagaggagatgacatggcacaatcaattaattctacggtagaattaacgactactggtgtttcttacctcggtatggggggaaaagttggcaaatttctcttaggaaataaaggattagaattttacagcgatgctaatgttgaagattacattcaaattccttgggaaaatattgaaaaaatcggagcaaatgtttctcgcaataaaatcagccgtcactttgaagtctttactgacaaaggtaaatttctttttgcctcaaaagattcaggaaagattctaaaagtagctcgccaacatatcggaaacgacaaagttgtccgtatgctaaccttggttcaaaccattattaaaagactatcaagatttgtcaaaaggaaataaatctagtataataaagagtacggataagtaagagtggagctctttcagaaagtctgcggttgctgtgagcagatagagtgataattccgaaattctaccgttatatcatttaaaaatagaaaattaagtgcacaggatgtgaagctggatggaaccgcgcgattgcgctccagcaagtttacatgctgtgctttttgttcatctgagctttatttagccatatgaacgctgaagactactggaggaaaactatgttagacatcaaacgtattcgtaacgattttgacgaagtcgctaaaaaattagcaacacgtggcgttgctgctgaaaaattagctgaattaaaagaacttgacgacaaacgccgtgaattgcttgtcaaatccgaatcagctaaggctgaacgcaacacagcatctgccgctatcgctcaagcaaaacgcaacaaagaagacgcttctgaacaaattgcagcaatgcaaaaattatcagcagatatcaaagctactgatgctgaattagctgaaattgatgacaaattagccgaattcacaactacacttccaaatatcccagccgctgatgttcctgtcggtgctgacgaagatgaaaacgtagaagttcgccgttggggaacacctcgtgactttgactttgacatcaaagctcactgggatcttggtgaagaccttggtattcttgactgggaacgtggtgccaaagttactggctctcgcttccttttctacaaaggacttggtgctcgcctagaacgtgctatctacaactttatgttggatgaacacgctaaagaaggttacacagaagttatcccaccttacatggtcaaccatgactcaatgttcggtactggtcaatatccaaaattcaaagaggacacatttgaattagctgactctgactacgttcttatcccaactgcggaagtgccacttacaaactactaccgtggtgaaatccttgacggtaaagaacttccagtttacttcacagcaatgagcccatcattccgttcagaagctggttcagctggtcgtgacacacgtggtttgattcgtcttcaccaattccacaaagttgaaatggtgaaattctctaaaccagaaacatcatacgacgaattggaaaaaatggtggctaacgctgaaaacattcttcaaaaacttggtttgccataccgtgttatcacactttgtactggcgatatgggattctcagctgctaaaacttatgatttagaagtttggattccagcacaaaatacttaccgtgaaatctcaagctgttcaaatactgaagatttccaagcccgtcgtgcccaaatccgttaccgtgacgaagcagacggcaaagttaaacttcttcacacacttaacggttcaggtcttgccgttggacgtacagtcgctgcaatccttgaaaactaccaaaacgaagacggttctgtaacaattccagaagttcttcgtccatacatgggtggagctgaagtcatctcacctaaataataaattatcctgctagccaactgactagcaggtatttttactaaagaaaccaaaatacaatgaaaatccccttgaaccatcctcaaaccaagaaatttttcaggatttgaggctagcacaagcgggattttttaatattttctaaaacgttgataacgactttcaaggagttgttccaatggtagttgactaagctcatctaattcagtgattagatttgttttaatcatttcaacaatttcacttgaaaaatagccatgttcgggaataactctatcaactactcccatattataaagctcaccagctgtgattttcatcaattcagcggcttctgtcgcacgagagccatctttccaaagaatagaggcaaagccttctggactcaaaatcgcatacatgctgtgttcgagcatccaaaccttatcagctacagcgagtgcaagagcaccaccagagcccccttcaccaatgataatagcgataattggcactttaaggtcgctcatttcaagtagattgcgtgcaatggcttccccttgcccacgttcttcagcaccaacaccaggataagctcccgctgtattgataaacgtaacgacaggacgaccgaatttttcagcttgtttcatcaaacgtaatgctttacggtaaccttctggatttggttgaccaaaattgcgtttgagattttcttgtaaattttttcctttttgaataccaataactgtcacaggacgaccatctaggcgtgcgataccgccaacaatggcaccgtcatcggcaaaatgacgatcaccatgaagttccatgaaatcatcaaaaatgagttcagcgtattccaaggttgtcaaacgtccttggtcacgcgcttctttcaatattcttgatacatcgctactcatttagcacctccatgaaacgcaactaatttggcaataacatctggcatttccgtgcgtttaacaatcgcatcaacaaaaccatgttccaaaaggaattctgccttttgaaaatcctcaggcaagttttctcgaacagtcgtttcaataacacgtcgtccagcaaagccgactaaagcttgtggttcagcaataataatatcaccttccatagcaaaacttgctgtcacaccacccgttgtagggtcggtcaaaatcgttaaataaaacagaccagcttcagaatgacgcttaacagcagctgaaatttttgccatttgcatcaagctcataataccttcttgcatacgagcaccacctgatgctgtgaaaatgacaacaggtagtttttcttcaattgctaattcgaataaacgtgttattttttcaccaacaactgtccccattgatgccatgataaagtttgaatccataatggcaagcgccactttttgcccctttatcaaagccttaccagtcaaaacagcttcatcaagtccagttttttcacgcattttagctaatttttcttggtaacctgggaatttaagagggtcttgcgtttgtatcccagtaaagagttcctcaaaacttccttcatctacggtaatagctaagcgctctttggcagaaattcgaaaattataagaacaagctggacaaatttttgccactcctaaatccttttgataaatcatatgcttacaagctgggcactttgcaaacaattcatcaggtacctctggtacttcacgaggcgctgattggtttagggagttattgggagtaattcgaatgtatttatcttttttactaaataaagccatgaaatctcctaatcattttctttattataatttggcaagaaagtctccatcaagaatgacgtatcgtagtctccagcgatgacatgctcatctgaaattaaatccatttggaattctgcatttgtggtaacaccttcaatttctaactcataaagggcacgctgcattttcatcagagcatcaaatcgattctcaccatgaacaataattttagcaatcatactgtcataataaggtggaatactataaccattgtaaacagctgaatcaacacgtaatccaacaccaccacttggcaaatacaaatctgtaattttaccagggctcggtgcaaaattgaatttcggattttcagcattaatacgacattcaatcgcatgacctgtgattgtaatatcatcttgtgtcacagataatggttgacctgctgcaatacgaatttgttccttaacaatatcaacaccagtaacaaactcagtgacagggtgttctacctgaacacgtgtgttcatttccataaagtaaaattctgatgttttctcgtcaagcaagaattcaatcgtacctgcattttcatagtgaactgcttttgcggcacgaatagcggcatcgccaatttgagcacgcaaggttttaccaatggcaactgatggactttcttctaaaactttttggttattacgctgaagagagcagtcacgttcaccaagatgaacgacattgtcatgagaatcacctaaaatttgaacttcgatgtgtcgagctggatagatgactttttcgatgtacatagcaccgttaccgaaagccgccaaagcttcttgtgaagctgattcaaaggcaggtacaagttcttctgcagattcgacttttcgaattcctttaccaccgccaccagcagaagcttttagcataacaggataaccaagtctatcagccacttcaagtgcttcctctgcagtaaatacctcaccgtcagaaccaggaataacaggtacgtttgcagcaatcatttcagcacgagcattgattttatcacccattttatccatgatttcagcactaggaccgataaatttgatgtgcatttcttcacacatggtagcaaattttgaattttcacttaaaaaaccaaaacctgggtgaatggcttgcgctcctgtcacaatagcagctgacaagacagcattcatattaagataagaatcggttgaacgagctggaccgatacagattgcttcatcagccaaaattgtatgcaaagaatttttatccgcttcagaatagacagctaccgtattgattcccaattcacgcgctgcacgaataatacgcaccgcaatctcaccacgattggcaattaataattttttaaacatacgtctgcttttatcctcctatcaggaattgcatctttgcaacccttgtcaaaattctttatgttgtcacagtttacgttaaactactattcttcttaactgccaatagcaaatgtcaatgtgccagaagctgctaatttcccgtcaacttctgcttttgcttcaactacagcaattgtaccacgacgtttgacaaattttgctgtcatcaccaattggtcacctggaacaacttgtttcttgaaacgaactttatccattccagcgtagaaaactagtttccctttattttcttcttttgaaagttccaaaacaccagcagtttgcgcaagagcctccataatgagaacgcctggcattactggatattctggaaaatgaccattgaaaaacggctcattgattgtcacatttttaatcgcaacaatttcatcgtcactcacttcaagcacacggtcaaccaaaagcattgggtaacggtgtggcaaagcttcacgaatttgtttaatatcaatcatttaatacgtaccaatccttgtccaaattcaacaacatcttcgttatttaccataatttctgtgacaataccatcgtttggagctggaatttcattcatcactttcattgcttcaataatcaacaatgtttgaccttttttaacagaatctccaactgaaacaaaggctggtttatcaggagctggagcaagataagccacaccaacaagcggacttgttacttcatcaccttcagcaaaaatatcagtatcaacaactgtttcttcagaatcgcttgctgcttgcgcaggtgccacaggagcagttgctgctacttcaactggtgccgcagcaggagcttgactagcttgttgtggtactactggtgaagtgtattcatttttgctaaatgtcaattcagcttcacctgttttaaatgaaaattcacgtaaacttgattggtcaaattgtgccatcaaatcttttacttctgaaatattcaccattacgcctcccaacgtttaaatgctaaaacagcattgtgtccaccaaagccaaatgtatttgaaatagcatattctagctctgcttcttgaccttgtccataaacgacattggcttcaatatcttctgacaactcacgtgtaccagctgtcattggaatgtagttatgacgaagtgcttcgatagtagcaacagcttcaacagcaccagcagcaccaagaaggtgaccagtaaatgattttgttgaagaaactggaacatctttaccaagaactgttacgatagctttgctttcgcctttttcattggcttgtgtagaagtaccgtgtgcattgacatagtccacatcttctggagaaatacctgcttctttaatagccaatttaatcgctttagccgcaccagaaccgtctggtgttggtgttgtttggtgataagcgtcacagttgctaccataaccaacaacttcagcaaggattgttgcaccacgtttttgagcgtgttcaaggctttcaagaacaagaacacctgcaccctcacccatcacaaaaccgttacggtctttatcaaatggaatagcagagcgagctgggtcttctgttgttgaaagggcagtcaaggcgttgaaacctccaataccgatttcattgattgttgattcagcaccaccagctaagatcacatcatgataaccgaatttaatttcgcggaaagcttcaccgattgcatcattagatgaggcacaagctgttgtgattgatttacatacaccacgagcaccaatacgcaaagcaatgtttcctgcagccatatttgacaaagctttcggaatgaacattggttgaatacgtttgattcctttttcgtgcatacgaataatttgctcttgcatttcttgcaaaccaccaataccagatgacacgataacacctgtacggtcacggtcaacagtatccatatccagttttgcattttcaagcgcttctaaagtcgcataaatcgcataaagtgaatattggtccatacgatttttatctttgcgaacaaagtatttatcaaatggaaaatcgtgaatttcaccagcattgtgaacagaaatttcagaattatcaaatttagtgattggtccaataccaattttaccgtcgtgaagattattccaaaactcttctggtgtatttccaataggggatgttaaaccgtagcctgtaactacaactctatttaatgtcatttttgtctccttttaagagaaattttcaactctaattaaaatcatcaagacaaagcaatcgattattgcattgtcataccaccgtcgatagcaatcacttgacctgtcaagtaatcttgctgtgctaagaaactagcaacagaagccacttcttcagctttaccaatacgtttcattggaattcctgccaaaatcgcttcttgcattttttcaggaatcgcatcagtcatatctgattcaataaaaccaggggcaatagcattgacacgaacaccgcgcgcagctacttcacgagcaactgatttcgtaaaaccaatcaaaccagcttttgaagcagcgtagttagcttgtccaacattaccagtcaaaccaacaacgcttgataagttaatgatagcaccttgacgagcacgtgtcatcggttttaagactgattgtgtcatgttaaacgcaccagtcaaattaactttaagcacagactcaaaatcagcttctgacatttttagcattaatttatcattggtaatacctgcgttattaactaaaatatccacagaaccaagctcgttgatagcttcatcaaccatacgcttagcatcatcaaaatttgacacatcacccgaaatagcaatcactttaacgtgatagtctttaaaactatcaatcaaatcttgcgaaatttcagaacgcccattaaggacaatattagcgccaagactagcaaattgacgtgcgatagctaaaccaattccacgagttgaacccgttacgaaaacatttttatctttgatttccatgattttctcctatttttctagcaaagcttctaagctagcttcatcttcaaccgttgagactggaatagccttatcgattttacgaagaaatccgctcaaaactttaccaggaccaatttcgataacttctgtcattccaagctcacgcattgtttcgatagaatcataaaaacgaacaggctccttaacttgtctagcaagtaaagttttaatatcagcatggtccataacttttgcttctgtattgccaattaaaggaacttgaaattcagaaaatgtcaccttatcaagaacctctgccaaacgttcactagcagattgtagtaaagcagtatggaaaggtcctgaaactttcaaaggaattaaacgttttacgcctgcttcttttagcaactcaacggcataattaacggcttctgtttctccaccgataacgatttgtgcaggtgtattgtagttagcaggtgtcacaattcccttgctagaagccttttgacaaatttcttcaatcaatgaagcctctgtattcatgacagcaaccatttttccagtaccagctggcgccgctgtttccataaattcaccgcgcttagcaacaagcgcaacggcatcttcaaaacttaaagcacctgaagccaccaaagcagaatattcaccaagagaaagaccagccaccatatcaggacgatatcccttttcttgcaacaagcggaaaatggcaaccgaagttgtcaaaatcgctggttgagtatagcgagtttggttgagcttatcttcctcattgtcaattaattcacgaatatcatatccgagaatgctgctagcttgttcaaaagtttctctaacaataggatatttctcatataaatcacttgccattccaagtttttgagccccttgaccggcaaataaaaaggctgtttttgtcattaaatcctcctaagcgggaaaattggtttattttatattaaagttttttagtctttatcactaatcagaccaacgtttagcttcttccaagatgacttcttgagcgccatagtaaaggtctttcaagatttcttcacaagtttcttctttacgaataagccctgcaatctgaccggccataactgaaccagtaacaacatcaccgtcaacaaccgcattacgtaaagcacctgcaccaagcacttcaatatcttctgccgtcttacgtccagctaggaaatctttttcagcatgtgcatatgatgttgttaatttatttttgacagcacgaactgggtgtccaacaactgacgctgaaataacggtatcaatatcttttgctttcaagattttatctttaaagttttggtgtgcattagattctttagaaactgcaaagcgtgttccaacttgaatagcttccgcaccaagcataaagatcgctgcagcaccacgtccatcaccaacaccaccagcaccaataacaggaatatttaccgcatccacaacttgacgaacaagtgtcattgttgtcaatttaccgatgtgtccaccagcttccataccttctgcgataactgcatcagcacctaatttttccatacgttttgcaagagcaacacttggaacaactggaataactgtaatacctgcttcatggaaacgttccatgtatttaccagggttaccagcacctgttgtgacaacttttacaccttcttcaatgactaaatctacaatatcatcaacaaatggtgataaaagcataatattgacaccaaaaggtttgtctgtaatttctttaactttatcgatattagctttaacaacttcttttggggcattaccaccaccgataatacctaaaccaccagcattagaaacagcaccagctagatcaccatcagcaacccatgccattcctccttgaaaaattggatattttatatttaataattctgttatacgtgttttcatattaaaccttcttagtctttataaaacaataatttgatagtcaaactatcataataagaagagagggagtaagataagcactaatgtcttagttacatatcccacaacccttcctactaaatatagtggagttagtttttagcaccaactccagccatgctattattttgttttttcttcaacgtaagcaaccaagtcacctacagtattaagaccttcttcagtttcaatttggatgtcgaattcatcttcgatttctgaaataacttggaaaacatcaagcgaatcagcatcaagttcatcgaaagtagtttccaattttacttcatctgtctctttaccaagttcttcaacgataatttcttgtactttttcaaatactgccatgattatttctccttataaatataaataaaaattttatcttgtgcttatacacaagtttgtaactagattttaacaattagactgccccatgtcaaacctccaccaaaagcagagaaaagaactgtttgtgaaccgtctaatttaatgtatcctttatcaacatactcagataaaagaatcggaatacttgctgcactggtatttccatattccatcatgttagctggaagtttatctacatcaacaccaatttttttagcaattttatctaaaatacggatattagcttggtgtaaaaacaaataatccaaatcttcagctgccacatcagaagcttcaattaaaaccttgatactcttagaaacgtcacggattgcaaaatcaaaaattgctctaccatccatttttaagaatttgtcatcagtttcttcttctgaaaatggcgaagacaagccaactttccctgaagttaaactaagcccacgactgccatctgtatggagtgattcggctaagaaatgttttgtttcagaagcctcaatcaaaacaccaccagcaccatcgccaaacaaaaccgaactactacgttcagaccagtctaacgtttttgacaaagtctcagcgccaatcacaattccttttttgtacatacctgactggatgaatttatccgcagttgccaaagcaaatacaaaaccactacatgctgccgtcaaatccattgcaaaggcattaaccgcaccaacattcgcttgaatacgtgctgccgtagaaggcattaaactatcaggggttatcgttgcaacaatgatgaagtcaatatcttcagccgataaaccagctttagaaatcagttgcttggcaacttgtgtccctaaatcactagttgtttcatttcgagtgatgtgtcgtcttttgataccagtacgtgatgaaatccactcatcactagtatccataattttcgacaaatcatcgtttgtaatcacttgttcaggggcataggctgctgcctgagcaattcttgcaaataccattattacattaactcctcaagaaacttatgaagattcttcaacccttgagccaaggcttcaaattcctcttcattcatatcttccgcaatatggataaccatatttttgtggaatttatgatgaagtctgtctagtaatcttcctttttttgtcaaagttaagtgaacaacacggcggtccaattttgaacgtcgtctttcaatataaccttttgcctcaagtttattcaggctagtggttattgttccgagcgttaacatcaactcacgagcaatatcacttggagtaacattagaatttttaccaataatctcaatggtatgcatttcttttaatgaaacatcattgaactgacttgctcttagacttgtctcttcaatgacttgaacacggttaaaaatatcaacaaggtattcattgattctattataatccaagatttcacctcctaaataaactttgacagtcaaagtatatcaaacatcaaaacattttgcaagatatttaagattcttccattcaataatttgaaaatcgaatcatcttcttacattattttcctgaaaattttggacgacgtttttcagcaaaagcacggacgccctctttaaaatcttccttaaatgctagttcttcttgaagttgcaattcaagtgacgtataatcttcccaaccttcaaaagatgccttccatgacatttctttaatcgcacggtaagaatttgctgagcctcgtagcaaacgttttgtgagttgatttgttgttcgttcaagcttttcagactcgcatagtcggtaaacaatgccatattcaagcgctttttgggcattcaaaccttccccagtcattgccaattgaatggcacgagttgtaccaattgcacggctcattaagaaaaggcctccagcatctggcgcaagacctacaccaacaaaagcttgaatgaatttagctttttcactagcaacaacaaaatctgcagcgacagccatatttgcagctgctcccgcaaccgcaccatctacactcataataactggctttggcaattttttcattgcaaatgaaattttattaaccaaactagcaatttcaaccaatgattcaacattgtcagattctacggcacgttgcatttctgccaaatcaccgccaattgaaaaaacttttccaactgccttaataaccaaaatcttgacagaatcatctgatttaacgttatctaaaacctcaagaatctcttgacatgtcgggatattaaaaccgtttgaaatatcaggacgattcaaggttaaagttgccacttcgcccttttcataaataacattattaaaagacatctatttacctccaataaataggacaaaaatagtttgatgatttaactatttagcaagtgctattttagcatattatttctttatttatcaagtaaaaactgcttatttcacaaaaataatttgatatataaataattcaacaatcaaatgattgtaataaaaaaatggaaaactagcgataattgctacctttccacgccttttcttactttaatcaacaagttcttcaaaaatctgagtcaaattgtcaaccaagcgatttgccttgctttggttcattccaaataacttatcttcaattgcccaaacttgcaagtcagcagaaacacctgcttgaatacctttttcactgtcctcaacaaccaaaatattatcatgattcgttcctaattgccgagcagcttcctgataaatagctggatgaggttttccttttggaaattcttcccctgatagaataactgagaaatacgctctcatctttgtatcgtctaaagcctttaaaatatcatgttttgttgaacttgatgctaagcccaaacgataaccattatcataaagcttcttaatcacttcaaaagtatctggaaaaattaaatccttataaggaagtgggtgattatgcttataggttgtatattcttcttgcaattggtgaatatcccaattctcataatcatcacgtaaaatatctcgccaaatttgtttcatgtttccaccaataaaaaaactaggtggtaaatgcttgatactaattcctttttcagctaaaaatttttcgcgcctatgataataaaaagtctctgtatcaaataatacaccgtccatatcaaaaataatagcattaaaattttccattcctttattatactatctttttcttttaaaaactactgacaaattttcagaattttgctataattgtttacaaatttaaattttggagaagtcatgaaagtaatcaaatttggtggtagctcgctcgcttctgctgagcaactaaaaaaagtattgaacattgttaaatcagactcagaacgacgctttgtcgttgtatctgccccaggtaagcgtaacgctgaagataccaaggtaacagacgcccttattaaatactataaaacatatacagctggcgatgacgttactgctgcgcaagaatggattatcaatcgttatcaagccatggcagaagaactcggtttaaactcttctatcgtgagcaaaattgctggtgccattacaaatcttgcaactcttcctatcgacggaaatgattttctttatgataccttcctagcagctggtgaggacaataacgcaaaactcgttgcggaatacttccgtaaaaacggtattgctgctcgttatgttcaccctaaagaggctggaatcatcgtatctagtgaaccaggaaacgctcgtattcttccgtcaagttatgacaagcttgaagaattacgtgattctgaagaagtccttgttatccctggcttctttggtgtaacaactgatgggcaaatttgtaccttctcacgtggtgggtcagatatttcaggttctatcgttgccgctggtgtcaaagctgatttatatgaaaactttactgatgttaatggtatttttgcagcccacccaggcgttgtccataaaccccacactattaaagaattaacatacagagaaatgcgtgagcttgcctatgcagggttctctgtcctacatgacgaagcgttgattcctgcctaccgtggtaaaattccacttgtcattaaaaatacaaataatcctgaccatccaggaacacgtattactttaaaacacagcggacctacaattcctgtcatcggtatcgctgcggatgataacttcgcaagtatcaacatgtctaaatacctcatgaaccgcgaagtcggatttggtcgaaaagtcctccaaattttagaagacctcaatatccgttgggaacacatgccaacaggtatcgacgatatgtcagttatcgtccgtgaacgcgaattaacaccaatcaaagaacaagaaattatctcttatctcacacgagagttaggtgttgatgaagttgatatcgagcacaatctttcaatcatcatgattgttggtgaagacatgaaaaaccatatcggggtaactgctacagcaaccaaagctctttcagataaacacatcaaccttgaaatgatttctcaaggttcaagtgaagtttctgtcatgtttgtaacccaaacagaacaagaaaaacaagccgtccgcgctttatataatgctttcttcacagaagaacaaaattaattctacacacgaaactctgaggcaataaagtctcagagttttatttttgatgataaaccctactaatcaaactgtgatatatagaaaattcaaactgactaaagttgtcattatttttatgtttcttagttttctcccttttattagattggcataactcaaaatctccagtacttgaagcctaaactgaaaaattagcaaaaaatactttttctgttcaaaatatttttcccttataagaaacaactattcaaaacctctactttatcgggtaacaaacactattttacctgtattgacataagaaagtaattgctataggctaatattatacatatgtaaccgctatctagcggaatgtcctgattataattcataccaggcaaatcgttaacattgctataaacgtttataccaaaaactttttacattctaacagaggagctaaacatgtacaaagtaacaaagaatctaaaaaaaatcactacagctttaatactagcgctagtggcactctttgctattgacagtaatactgaagtggcttatgccgcaactactggacttaactcttgggaaatcacaagtaaaatgactattgggtggaacttgggaaattcacttgatgcaacctattggactgacaatcctactccagtccaatccgttaccgcttggggaaaccctgaaccaacacaacaactttttgacaaggtaaaatctttaggatttaacacagtgagaataccagtaacttggtatcaacatcttacctacaataatgccacacaaacttacgaaatcaatcaagattggttggattatgtcaaaaaaacagttgactacgcctacaataatgacatgtttgttattatcaacgttcaccatgaaaattgggttaacgtagattactttaatgattcaaatcttgctaccgcaaaaacaaaactcaaagacatttggcaacagctttcagttacctttgctaattatgaccaacgtcttatttttgaaggaatgaacgagccaagacaaacttataactcctctgtagaatggggaaatggagattcatattcgtgggattatattaaccaacttaacagcacgttcatttcaaccgtaagaagcaattcctctggctataactctgaacgtttgctaatgattccttcttaccatgcaactgataattacgaagcgctaagtcaccttgacattcctagcaacagcggaaatatcgccatttccgtccatgcctatgaaccatattcatttacaatggatagtagcgaaagccataaataccaaagcaacaacaaatacgggggctataatccagatactctaaaaagtatcatgaacgaccttaaaaagattcaaagcgaaaaaaatgctccaattattatcggtgaatttggtgcctcagatttcaacaatacagacgaacgcgttgcttgggcaaaagactacatgactcaggctactagcgctggctttgtatgtgtcctttgggataataatgctgataatgactactcatcaagcgagaatttcggatttattaaccgttcaaccaacgaactttatgacaacgctaaaagtgtcgtttcaacactcattaactacgctaaaaagaatacctcaactgatactagcaatactggtaacacaggcagtacagataatactggtgataattcaagttcagaaaaggactattcatggaaagatttgtttggtgccaatggagcagcttgcttgcaagcttggcaatcacaagaaattcctaatgctctaaactacattaacaacgattataaaatcgtagttctatatagaggacaaaacgcaccaaaactcgttgtggaaaatgcttattcttatagttgggacgttaccgttgaaccaagctctattgaatatggtgaaaataatgttgcctactataattatagcgacattgcagcggccttttcaaaatatggcgtaagtatctatgacatgggaaaagttttagcatttacatctgcatataccgaaatttacggtgtttatgccgcaccagtctaagaatttgacttataataatatgtagtctatgaaagcagttcatatcgaactgcttttttgcatctctattattctatagccttgtgctctccaaataatattttcaatatctagaaattatttttaaactcgttaaagaagggctcaatttgggttagaaacgccttctttccctcaaagcgctcccctcgcatcaccttcgctagtttttcttttgctcccgctcccaatcgctgctcaaccgcctgcagccgctcctgataagccacataatccgccagatccagaaagcttgcttgcgccaaacaatgccccacgtcactaatctcctcatatggcagctgattaaacttgcgtttcaaactctcttgatggcgaatcacatccttgagatagttggaaaacttcgttttaaaataagcataaagggacaagtcgtcctgcaacaaatctggcttttcttgcaggagacggaacagaaccacccgtccctcttgtaaccaatcatcatagtcccataatttgacaaaatagtgacgacgcaacttaagcacaatcggtttgaccttttcaaaatagctttcaaaggtttccatcattttcaaatctccttgacagttagtttcccttacttaaaaggtaatcccattataaaaaggaaagcgcaaaaagaccatgacatttttgtcatggtcacaaaagtgcttatgaagtaagaaaaaaacaacagcctcagctattgtcaccgtcttctttactccgccagtaggactcgaacctacgacatcatgattaacagtcatgcgctactaccaactgagctatggcggataaaagctaagcgactaccatatctaacagggggcaacccccaactacttcaggcgttctagggcttaactgctgtgttcggcatgggaacaggtgtatctcctaggctatcatcacttaactctgattgattatccaatcaaaattgaatacctatatattctaacaagtttccgacgcgctgtcaattctctcagttactttggataagtcctcgagctattagtattagtccgctacatgtgtcaccacacttccactcctaacctatctacctgatcatctctcagggctcttactgatattaaatcatgggaaatctcatcttgaggtgggcttcacacttagatgctttcagcgtttatcccttccctacatagctacccagcgatgcctttggcaagacaactggtacaccagcggtaagtccactctggtcctctcgtactaggagcagatcctctcaaatttcctacgcccgcgacggatagggaccgaactgtctcacgacgttctgaacccagctcgcgtgccgctttaatgggcgaacagcccaacccttgggaccgactacagccccaggatgcgacgagccgacatcgaggtgccaaacctccccgtcgatgtgaactcttgggggagataagcctgttatccccagggtagcttttatccgttgagcgatggcccttccatgcggaaccaccggatcactaagcccgactttcgtccctgctcgagttgtagctctcgcagtcaagctcccttatacctttacactctgcgaatgatttccaaccattctgagggaacctttgggcgcctccgttaccttttaggaggcgaccgccccagtcaaactgcccgtcagacactgtctccgatagggattacctatctaggttagagtagccataacacaagggtagtatcccaacaacgcctccaccgaaactagcgtcccgatttcgtaggctcctacctatcctgtacatgtggtacagatactcaatatcaaactgcagtaaagctccatggggtctttccgtcctgtcgcgggtaacctgcatcttcacaggtactaaaatttcaccgagtctctcgttgagacagtgcccaaatcattacgcctttcgtgcgggtcggaacttacccgacaaggaatttcgctaccttaggaccgttatagttacggccgccgtttactggggcttcaattcacaccttcgctaacgctaagcgctcctcttaaccttccagcaccgggcaggcgtcaccccctatacatcatcttacgatttagcagagagctgtgtttttgataaacagttgcttgggcctattcactgcggctgactctaagccagcgccccttctcccgaagttacggggccattttgccgagttccttaacgagagttctctcgctcacctgaggctactcgcctcgactacctgtgtcggtttgcggtacgggtagagtataattaacgctagaagcttttcttggcagtgtgacatcactaacttcgctacttaacttcgctccccatcacagctcaatgttatagatataagcatttgactcatatcacacctcactgcttagacgtgctcttccaatcgcacgctttagttagcctactgcgtccctccttcactatatactctagtacaggaatatcaacctgttggccatcggatacacctttcggtctctccttaggtcccgactaacccagggcggacgagccttcccctggaaaccttagtcttacggtggacaggattctcacctgtctttcgctactcataccggcattctcacttctatgcgttccagcgctcctcacggtacaccttcttcacacatagaacgctctcctaccatacctaaaaggtatccacagcttcggtaatatgttttagccccggtacattttcggcgcagggtcactcgactagtgagctattacgcactctttgaatgaatagctgcttctaagctaacatcctagttgtctgtgcaaccccacatccttttccacttaacatatattttgggaccttagctggtggtctgggctgtttccctttcgactacggatcttagcactcgcagtctgactgccgattatatctcattggcattcggagtttatctgatattggtaatccgggatggacccctcaatcaaacagtgctctacctccaagagacttaacatcgacgctagccctaaagctatttcggagagaaccagctatctccaagttcgtttggaatttctccgctacccacaagtcatccaagcacttttcaacgtgccctggttcgggcctccagtgagttttacctcaccttcaccctgctcatgggtaggtcacatggtttcgggtctacgacatgatactaagccgccctattaagactcggtttccctacggctccgtctcttcaacttaacctcgcatcatatcgtaactcgccggttcattctacaaaaggcacgctctcacccattaacgggctcgaacttgttgtaggcacacggtttcaggttctatttcactcccctcccggggtgcttttcacctttccctcacggtactggttcactatcggtcactagagagtatttagggttgggagatggtcctcccagattccgacgagatttctcgtgtctcgccgtactcaggatactgctagggtttaagactatttcgattacgaggctgttactctctttggcttaccttcccaggtaattcttctataatcttgcgtcccacaacgcagtcctacaaccccgatgtgtaaacacatcggtttgccctcttgccagttcgctcgccgctactaaggcaatcgcgtttgctttctcttcctgcagctacttagatgtttcagttcactgcgtcttcctcttcattaccttaacagtaatgagtgacatgcatcacatgccgggttcccccattcggacatctctggatcaatgtttacttacaactccccaaagcatttcgtcgttagtcacgtccttcatcggcttctagtgccaaggcatccaccgtgcgcccttattaacttaaccttattttggtcttctgaccttaaactcattaaatcacagcgtttcggtttatttcttgttactttctacaattatttctaattgcggaatttgatatagatattcaattttcaatggacaatcaccttgaatctttcgattcaatggagcctagcgggatcgaaccgctgacctcctgcgtgcaaagcaggcgctctcccagctgagctaaggccccacaagacctctcaaaactaaacaagacttcccaaacgtgcttccgttttttccttagaaaggaggtgatccagccgcaccttccgatacggctaccttgttacgacttcaccccaatcatctatcccaccttaggcggctggctcctaaaaggttacctcaccgacttcgggtgttacaaactctcgtggtgtgacgggcggtgtgtacaaggcccgggaacgtattcaccgcggcgtgctgatccgcgattactagcgattccgacttcatgtaggcgagttgcagcctacaatccgaactgagattggctttaagagatttgcttgccgtcaccgacttgcgactcgttgtaccaaccattgtagcacgtgtgtagcccaggtcataaggggcatgatgatttgacgtcatccccaccttcctccggtttattaccggcagtctcgctagagtgcccaactcaatgatggcaactaacaataggggttgcgctcgttgcgggacttaacccaacatctcacgacacgagctgacgacaaccatgcaccacctgtcaccgatgttccgaagaaactttctatctctagaaatagcatcgggatgtcaagacctggtaaggttcttcgcgttgcttcgaattaaaccacatgctccaccgcttgtgcgggcccccgtcaattcctttgagtttcaaccttgcggtcgtactccccaggcggagtgcttaatgcgttagctgcggcactaagccccggaaagggcctaacacctagcactcatcgtttacggcgtggactaccagggtatctaatcctgtttgctccccacgctttcgagcctcagcgtcagttacagaccagagagccgctttcgccaccggtgttcctccatatatctacgcatttcaccgctacacatggaattccactctccccttctgcactcaagtttaacagtttccaaagcgaacaatggttaagccactgcctttaacttcagacttattaaaccgcctgcgctcgctttacgcccaataaatccggacaacgctcgggacctacgtattaccgcggctgctggcacgtagttagccgtccctttctggtaagttaccgtcactgtgtgaactttccactctcacacacgttcttctcttacaacagagctttacgatccgaaaaccttcttcactcacgcggcgttgctcggtcagggttgcccccattgccgaagattccctactgctgcctcccgtaggagtctgggccgtgtctcagtcccagtgtggccgatcaccctctcaggtcggctatgtatcgtcgccttggtaggccgttaccccaccaactagctaatacaacgcaggtccatctactagtgatgcatttgcatctttcaagcatctaacatgtgttaaacactgttatgcggtattagctatcgtttccaatagttatcccccgctagtaggcaggttacctacgcgttactcacccgttcgcaactccttctactctagcaagctaaagtagtcagcgttctacttgcatgtattaggcacgccgccagcgttcgtcctgagccaggatcaaactctcatttaatcttgttctcattctgtcactgacagatttattttcttaacaggtcgatttctcaacccgcacgtttggttcgtcttgttcagttttcaaaggtctttgcctcttgcgagacaacttctatattctatcaaatctgaaacagcttgtcaactactttttcaagtttttttcaatcctgtttcaaaccgattaccgcatccctctcggacaacagctatattagtgtatcatctcaagcttactttgtcaagaacttttttagcttttctgtaaacctaagacctgccctcttgcgacagctcatctagtatactaaacttagcctctactgtcaacctcttctctgaacttttttaagtgtgccttgttcccttttgggtgggggtggtaagattattgactaaggagcttgtagaaagggtgtagagtggggaaagagagcgattagaggctgaaatttagatatgcaaaaaaagagaaggaaccccttctctttgtcttataattcttgtttataagcttctgcttctgcttctgtacaaagaacaaagtggccaggtgtaatttcacgcatttcacgtggttggccatctagttctgcacttggatcgtattcttcatggatacgatttctttcagattctgggtctggttctggaattgcagtcaataagctcttagtatatgggtgaattggatgattatagacatcatcagatgttccaatttcaagcattttaccccagtgcataaccccaatacgatctgagatgtatttaaccattgacaaatcgtgagcgataaagagatatgttaacccctgttctctttgaagtttttgcataaggttaacaacttgagcttggattgacacgtcaagggctgaaattggttcatcggcaatgatgaactttggttcaacagcaagagcacgagcgataccaatacgttgacgttgtccacctgaaaattcatgtggatagcgtgttgaatggtctttgttaagtccaactaaagcaagtaaatcttgaactttttggtcacgttcttctttactgttaactaatttatggatgtcaagtccttccgcaacaatatcacgaattttcatacgaccattaagactagcttgtgggtcttggaaaatcatttgagcatttttacggaattcgtgcaattctttccctttaaggtgagagatagtttcgccatcaaaatcaatttcacctttattaatgtcgtacaatttcaaaatagcacgaccaacggttgtcttaccagaacctgattctccaacaagaccgaaaacttcaccttcgtaaatatcaaaactgatattatcaatagcttttacttcgttctttttaccttcgttaaaggtcaatgatacatttttaagttcaacaagcttttttctattttcagtcatcaagcttttctcccttcaagttctttccattttgcccaacgtttttgaattggtaatggtggtgttactttaggtgcacgttcatctaacaaccatgtggctgcaaaatgcgtatcactaactttaaacattggtggttcttcttcgtagtcaatatctaaagcaaactcattacgtggtgcaaaagcatcaccttttggtggattaaggagatctggcggtgtacctgggatagattgaaggcttcctgcttcagtatctgttgttggcattgaattcaaaagcccccaagtatatggatgttgtgggttatagaatacttcatctactgttccatattcaataatcttaccagcatacataacagcaacacgatcagccatacccgcaacaacaccaaggtcatgtgtgataaagacgattgatgaaccacgttctttttgaatttgtttcatcaaattcaaaatttgtgcttgaatggttacgtccaaggctgttgtaggttcatcagcaatcaaaatatctggatttgctgccaaggcaatcgcaataacagcacgttgacgcataccacctgaccattggtgcggataatcattaatatgttcttctgcgtttggaataccaacatttttcatgagttccaaagcacgttttaaagcttcttgtttagaaactttttcatgaatcataattggttcagcaatttgttgaccaattttcattgttgggtcaagacttgtcatagggtcttggaaaatcattgcaatttcatttccacgaaccttaatccattcgtcttcttttaattctgttaattttttacctttgaaatcgatgtctcctgtaacttctgcatttgaagctgacaagcccatcaacgtttttgttgttacagatttacctgaacctgactcaccaacaatggcaagcgtttcaccttcttttaagtcaaagctgacatcacgaatagctttaatttccccagcataggtatggaaatctacacggaggtttttaacttgtaaaattgtttcttcagtcatagtttttcctcctaacgatcaccagattttggatcgaatgcatcacgaagtccatcacctaataagatgaaggcaagtgagatcaataccaaagcaagggctggtaaaataacttgataagggtaatattgtaaatattcttgggcatcagtaatcaatgaaccaagtgatgctgtaggtggtttcaccccaaggttgatagctgaaagaacagcttcgtacatgatggcacttggaactgtcatcatgatttgaacaataataattcctgaaatgtttggaagaatatgtttaaaggcaatttttggcgcactttcacccaatgaacgagctgcaaggacaaactcttgttcacgataagaaagtgttaagttacgcacttgacgagccattgaagtccaaccaacgatagcaattgaaatgatgattgatgtgacaccattaccaagcaaaagtcctagcattgttacaataaccaagttaggaattgatgaaataacttcaatgatacgttgcataatcatatcgactttaccgccgacataacctgaaattaaaccgtatgttacaccaatcaagaggtcaatcaaagtagctacgattgcgataagaagggaaatacgaacaccgacaataatacgtttggcgatactacgtcccaaattatcagtacctaaaatgaattttgttccttctggtacaccttggtcagcataaacatctgttgcttctgtatttccagaataagtaattgtaccattccagaatggaagattatcactaatttttggtggaaggttacgatatgtcgtaacttcttttgtgttaaatgcattagcatcatcacgcggaactaaaacgactgaaatcattgaaaagacaatcaagatagccaagaaccacattgaaacgacagctaatttattttttttcaaacgacgccaagcatcttgcatgaaagaaagagcaggcttttcgattttttcttgtgagctggctgaaccaacgccaacaagtttaaattctctatttttttctgccatgttattctccttactgcaagcgtacacgagggtcaacgatacttgttgcaatatctgttaccaaaatggcaaccatcaacatcattgcatatacaatagttgtccccatgattactgggtagtctttagctggaatagatgtgacaaattgttgaccaattcctggaattgagaaaatttgttcaatcaatgctgaacctgtcaaaaggtttgccgccataggtccaaccaaagttaatactggaatcattgagttacggtaagcgtgcttacgagttacttgacgtttagtcaaccctttagcagttgctaattggatataatctgaactcaatgtttcaatcatttgtcccctgaagaaacgtgttacttgagcaaatactggaattgccaaggcaattgatggcatgacagtctgtgcaaatgttccccaaccagcaagtgggaataagctccatttgaaaccaagaagtaccaaaaggaaaagaccgataatgaatgaaggcacagaaatacctaatgttgagatgacactaaggacaccgtcaatccagttatttttgttacgtgctgaagcagcaccaaccaaaataccagcaataagtccaataacaagtgcttgaacaccaagttggatagaaacacccaaacgttgtgaaatcaaacgtgatactggttggttaattgattggtaacttgtaccaaagtcaccgtgaagaacattccaaagataagtaaggtattgttgccatactggcttatccaaaccatattgtttgttcattagagcaatcatctcatcagttagttttgggttattgtaaggtgtcccaggcataacttgcatgaggaaaaacgacagggtaaccacgacccagagtgttacaagcagaatcgcaacacgtttaagaatgtattttaccataatatttccttctctttattgcttttgttggcaggagaagaaaatttcctgtcaacaaaagcaagaattggtcgcaaccaattcttgcccaatatagtcactattaaagattaatcctctttataagcgtatgtaaagtcaacttgtaatccagtagaattacgaacaagtcccttgattgatgggttttgaagtgattttgtactgcggaagtaaagtgggttatagtgagcattgttataaagctctgcttccgctgtcttataatcttcagctgctgcggctggatctaaagcatctgttgtaagagctttttggtaagcagcatcgtaggcagcatcagaaatttgaccatagttgtatgaagatgttgaagtaaacaatccgtagaaagtagaaccttctggatagtcaccaccccaaagtgatactacaatatcaaagttttgattcttagaatcttgcagacgttgtttgaaagtgacgaatttttcttcaattgtcaaacctggtagagcattttcccatgtttgtttaatatagtcaactgcagctttagcaacagcgttatctgaatcagctgtgattgtcaatgtaattgagtcagtaccaagttctgccaaaccttctttgaagagttttgcagcttcgtcttcatcatagctgtaatcagcagcaacataatcagacaagtcagttccgtcaggtaatgtttcaagtcctgttggaaccaaagcattagctgccgtagaacctgtatcaatagctgcttttacaataccttcacggtcagttgccaagttaagtgcttgacgaatttttgtatttgtcaaagcttctgttgaaccggattcattgtaaaccatgtaagctgttgttgcttctggaacatctacaacatcatcgcggtttttattagcgttatagattgcatctgttcctgaaatgctagctgtatcaagctcaccgtctttatacatttgtacggctgtgtcagctttcttaacagtttgaacgtttacttttttagttttaacgttatcagcatcccaataatatttgtttttcacaagtgtgaatgttccgctcgtaccatcccaatcttcaacagtatatggtcctgagtacaaagcgttgtcagaagttgttccgtaatcatctccttgttcttcaacaaactctttgctttgtggcataaagtttgcaaatgaaagaagactttcaaattgtggtgatgggctagacaatgtaaagatgactttatttccgtcagctttaacgcctagttcatcaacacttttagttcctgcaataacttcttcagcgtttaaaacgtgcgcatctgatacaagataagcatactctgaagctgttgatggatcaacaatacgttgccatgtataaacgaagtcttcagcagtcaaatcactaccgtctgaccattttaaattatcgcgtaatgttgctgtatatgtcaaaccatcatcagatacctcaacgctttcagctaagtcaggttgtaaattaccatcttcgtcacggcgaagaaggttacttcctgagttaccgatagcgattgatgaataagtatctgtaacttttgaaatatccaaagtgctaatttctgttggtgtataccaattaatttcatcactgcttgaagatgacgatgaactgctacctccacaagctgccaaaacagctgcagaaactagcgtaaccgcccccaagccaatgcgtttccatgttttactttttagtaacacgtgacgcccctcctggtgttttctctaaattatattatttgacaaatagaattatatcataaacttttcttaaagaaaatacttttgtcagaattttttgtcagattatctaacacggtaattatatggtataatcataatgattaatttttttacaaaggatggaacttctaatgaagaagatttttgcgttttttgcaatttttctgactattcttgcagtaggaagcaaagttagcgcagatgatgattttgatgtagctgccgaacacgctattgctgttgaagctaccacaggaaaagtattatatgaaaaagatgcaaccacacctgacggcattgcatctatgactaagattttaactgtttacttagtttataaagctattgatgaaggaaaactttcttgggataccaaagtttctatttcagattatgcttatgatttaacagcgaattctgatgctagtaatgttcctatggaagcacgcgaatatacggttgaacaacttgtaaatgcagcaatggtcgctagtgcaaacagcgcagctattgcccttgcggaacaaatcggcggtactgaaagtaaatttgtcgatatgatgaaagcacaattggaagaatggggcatcacagacgccacaattgtcaatgcttctggtcttaataatagctatcttggtgacaatatctacccaggttcaagttcgaccgatgaaaatatgatgagtgctcgagatgttgctattatcgctcaacacttaatcactgaatatcctgatattttaaaaatcacaaatcaaacaactgctgactttgatggcactacgatgaatacctacaactatatgttagaaggtatgccatatgaacgctcaggggttgacggtcttaaaactggtacgacagaattggctggcgcttcttttgtggctacttcaactgaaaatggtatgcgtattatttctgttgttatgaatgcagacggttgggaagatgatgaatacgctcgttttgaagcaacaaatgacttgctagattatgtcaaatcaaactatgaaatggtgacacttgttaaagcagggaaatcttaccaaagtagtaaagctacggttaatgacggtaaagcaaaatcagttgctgctgtcgcttctgaagatttaaaagttgtccgtcgtattaatactgatgtttctgctgatttttcaactaatgcagacggctatgacgctcctattactaaagggcaaaaagttggaaccattacttataatgacactcaaattgtaggaactggttatcttgattctgaaccaagcgtaactgcggtcgctaagacagatgttgatagaagtattttcttcaaggtatggtggaaccatttcgttacttttgttaatgagaaactttaatttcatatataaaagaggcaagcctttggcttgtctcttttagtctattacccaacagaaccttccatttcataactaatcaatcgattaagttcaacggcgtattccattggtaattcttttgtgaatggttcaacaaatcccataacaatcatctctgttgcttcttgttctgaaagccctcggctcataagataataaagttgttcttctgagatttttgaaactttagcttcatgctcaagtgcaacttgtgaattgtgaatttcgttgaaaggaatggtatctgaacgtgaaatatcatccatgataatggtatcacattcaatatgactaactgattttttagattccttattgaaagtcacttgaccacgatagtcaacttttccgccacctttggcaatggattttgaaacaatcgaagatgaggtgtgtggtgcattgtgaatcatttttgcacctgtgtcttggtgttgccctttattagcaaaagcaattgacaacattgtgccacgcgcaccttcgccgtcaaggtaaacagatgggtatttcatggttgttttcgcaccaaggttaccgtcaatccattcaacagttgcatttttcttggctgtggcacgttttgttaccaagttatacacgttgtctgaccagttttgaatcgttgaataacgcatataactgccttcaagtgcaaaaatttcaacgatagcagcatgcagacttgctgatgaataatttggtgcggtacatccttcgacataatgaacgcttgccccctcatcaacgataatcaatgttcgttcgaattgccctgttgcttcattgttaatacggaaataagtttgcaaaggaatatcgaccttaaccccttttggcacgtagatgaatgttccacctgaccaaaacgctgaattcaaagctgctaatttgttatccgttggcggaactagtttagcaaaatattttttgaagaggtcaggatactctttcaaagcagaatccgtatctgtgaaaatgattcctaacttatcgtactcatctttcatgttatgataaacgacttctgattcgtactgagctgacgctcctgcaaggtaggcacgttcggcttcaggaattccgatacgttcaaacgtttctttaattttatctggaacatcatcccatgaacgtgctggtctgtcagaagctttttgataataattaatctcatcaaaattaatatctgacaaatcaggtccccaatcttgcattggcattttattgaaaatttccaatgatttcaagcggaactcaagcatccattctggttcgcctttttctgctgacatttcacgaacaacagcttcgctgattccttttcctgtcgaaaaaataggcgttacatcgtcatgaaaaccaaattgataatcaccgatatcaattggctttggggttactttttcatttttttcaggcatctagttacctttctaatccttactatcgttttcaatagcttttttcagagcattccaagcaagtgttgaacacttgattcgctgtggaaattttgaaacccctgctaaaaaactagcttcgcctagtcttttttgagcgtcatctttctcaccttgaaccattttagaaaaaatctcagccagttcaagtgcttcttcttttgttttaccgataacggcatctgtcatcatgcttgatgaagctgtcgaaatggtacaaccatcacctgcaaaagcgatatccgaaatgcggtcaccgtcaaacttcactgataaagaaatcacatcgccacaagttggattgttaagattgacttggtcaacatcttctaattttccatggtgatgtggacttttggagtggtcagaaactaccgccatataaagactatctaatctagaaagtgccattgaaaaactcctttgttttaagaattgcttctaccagtttatcacaatcttctttcgtattatagatataaaaacttgcacgcaccgctgaatgaataccaagataagtaatcaatggttgtgcacaatggtgtcctgcacgcacagcgacaccttcataatctagtgccgttgccacatcgtgtgggtgtaagccatctaagttaaaggcaattactcccatgtgttgacttgggtcttgtggtccgtaaaccgtcaaaccatcaatagcttgcaatttcggaaggacgtaatttactaattcttgttcgtgagcatgtacggcgtccataccaatattggttaagtaatcaatagctgctcccaaagtaatagcccccgcaatattgggtgttcctgcttcaaatttccatggtaattctttccatgttgcctcttgttcatagacaaaatcaatcatttcaccaccaaattcgactggtgacatttggttaagcaattcttctttaccataaaggacaccaatacccgttggtcctagcattttatgtcccgaaaaagcaaagaaatcgcagtccaaatcttgaacatcaattgtcatatgcggagcagactgcgcgccatcaacaaccatataagccccaacttggtgagctagctctgctatttttttgacaggttgaattgaaccaaggacatttgaaacgtgggcaacactaacaaattttgttttgtgtgacaatttgctttgcaagtctgccatgtcaagttgtccgtctttgaggtaagcgtaaactaattttgctcccgttttacggcaagcttcttgccatggaatgacattagaatgatgttccatgattgaaatgagaacttcatcgtctttttggagcacttcttctgcaaaacgtgctacccagtttagtccagttgtagtgcctcgtgtgaaaagaatttcttttgttgacttggcattaataaattggcgtgccttttcacgactagcttcgtaagtagccgttgcacgttcagccaaagtatgaacaccacggtgaacattggcatttgtcttatggtaataatcgttaagtgtatcaagaacttgttgtggtttctgtgttgttgccgcattgtcaagataaactaatggttcatcattgacaatttggtcaagaataggaaagtcttgataaatgttatgcgcatctaatgctgacattctaacgattctccaatttacggtctaataccgcaatcatttcatcacggacttcttttacaggaatttccgtaataacagcgcccaagaaaccacgaataaccaagcgctctgctgtatccttatcaagtccacgactcatcaaataatacatatcttctgggtcaacttgtccaattgaagccgcatgaccggccgttacatcattttcatcaattaacaaaatcggattggcgtcagaacgtgctttatcagaaagcattaaaacacggctttcttgttgcgcatctgctccttttgctcccttgataatatgtccaataccgttaaatgtcagtgttccacgttctaaaataacaccatgttgtaaaatgtgaccaattgaattgcagccatagtttgtcacacgtgtatccacgccttggacttgacgtcctgatgatgctgcaacaactttaagattggcatggctaccatttccatacaaatctgaatcgaaatcagcgataacattgccttcattcatgacaccgagtgcccaatcgacactagcatctttaccgtggcgagcacgacgactaatgtatgttgtgacattctcacccagacggtcaatagctgaaaatttcacttggctatcatcaagcgcaataacctcaacgctgatattcgctgttgcttgagcaccaccctcgccaattgtttcaaagcgttccaaataattaatgcgactattgcgccctgcaatgattaaaatatgcttgttaaacggcacatcactagctttatcttgataaaataagccttcgattggctcttcaatctcaacattatcaggaacgtaaagaacagctgcgctattaaaataagcggtatgataagcagctaacttatcttccttaaaatcacgcgctgctccaaaatacttttcaataatatcaggaatttcttccaaagctgtatagaaatcggtgaaaataacacctttattaatcaaatcagttggtaattgttctaaaacggtttgtgtaccgacttgaacaagttttggattgtctccaagcgctgtgaaatcagggacattagcaagtgcttggtcctctgaaatcgtcccatcacctaagttccagcggtgaaatttaacacggttgatttcaggtaatggcaatttatctatattatcaaaggcagtcaaacgacgttcttgtagccataaaggttctgcctttgtttgtgaaaaatttaggatagattctttcgtcataatttgatgtttactccttttcatagtcatcatacgagtatcgtctgccaaaagcagactttgacatcatcaattacacttcttcttcgtattttagtccaagttcttctgcaatttttgcataaccttctttttcaagacgggcagcaagttcagcatcacctgaaagaacaacacgtccatccatcataatatgcaccacatctggtgtaatatagttgagaagtcgttgatagtgagtgataatcatagctccaaaattatcgccacgcatagcgttaacaccttttgaaacaattttaagagcatcgatatcaagtcctgaatcaatttcgtcaagaagtgcaaatttaggttcgagcattagcagttgaagaatttcattacgttttttctcaccacctgagaaaccttcgttaaggtaacgttctgccatttcttctttcataccaagaaattccattttttcatcaagttttgtgatgaaatccataactgaaattttatcgtcatcttcttttccagcattcatagctgcacggataaattcagcattggtgattcctgggatttcagatgggtattgcatagcaagaaaaagcccgagacgtgcacgttcgtcaacttcgagttcaaggatattttcaccgtcaagcaaaatttccccttgagtaacctcataatttggatttcccataatagctgctgacaaagttgatttaccagtaccattaggtcccataatcgcagcaatctcaccagtcttaagggttagattgacaccttttaaaatttctttatcttcaatcgaaacatgaagatcttttatttcaagtacagacatgtgtacattcctccaattaatcaaatacgacagtaacttttttctgaaaattaccgcagttctatagggttactaatcattatatcaaaaaaaagccataataggcttttcaatcacttattatttttgcgatttttccattttagcatggttgcttggcgataatcactatttccgataaatttaagcgtatcaaagagtggtgtacgccctactccccaaatttctagcccttcaataaagacttctaaagcaaaggcaacaccaaccattagaagcacaccaccaagacggctagagacatttagcaacaaggcgataagtgaaaagagaatggcaataccataaaccactaaaaccgctccacgatgcgtgaatcccattgccaaaaggcggtgatgcaagtgcatcttgtctgcttccgtcgctggacgccctgacaatttacggcgaataatcgccacagtagtatctagtattggcacaccaaggatgataacaggcgttaccacagcaacagctgttgaatttttcaacccttgcaatgataaaacaccaatcataaaccctataaacagggcacctgtatctcccagataaataatcgcagggttgtaattataagggaagaaacctgcaatacaagcaatcaagagtaagattgtcaacgttaggtaaaaatcagtttgcggtaaaaagaaatacgaaaccaaagccattgtaacaaggctaatgattgatacgccactaaccaaaccatctaaaccatcaatcaaattcattgcattggtaatcgaaataatccaaaagacggttaaaaagaaagtaatcactgaattaaattcgagcaagggaccgccaaatggtattttaaaactatcaaagcgaaaatctgtaaatgcccagacaacaacagctccaagaataatgcctgccatttttgtcttaggtttcaattcgtaaatatcatcaataaaaccagtcgttgtgataattaatccaccaataacaactggcaaaatataatcaaaataagatgttgtccatatcggctctttcaaaacccttggcattaggattaaggctgaaattaagaaagagataaaaatcgctaatccaccactacttggcataggtacttcgttgacacgtctagcatttggattatcaacagctccaacacgaaatgcaataaaacgaacaatcggtgtcaaaaataatgacagtaagaaagcgccgattaaaacaagaacatattcaattgtaaagggtgccatattataccaactcaatcatttttaattttgcaacagcgtcatctgctaacatttcaacaccgtgctcttgcaaataagcacgcgtttttgtacctgcgctagcatattccaacaaacgagcatacatcaaattcgcatagtaagacggatgattttgcaaatcaagtaaaatggtcatgtggtaaagaccgccatctttgtagagttctgatgcttcaactggaaaatcaattgctttagcaaaagctacgacagcttcaagtgttggaaaatcaaggacataatgaacataatcagatggattaatatcctcttctgttggctctgcttgagcttgttctgtgagaacttcctcaacagcaccttccatcatttcttcgatttttcctaatttttcatgcgcctcagtatcacctttagaaagcattgtttgttccaatgttttgaaaaattcctcaggtgacatgtttgacacgtcgtcgaatgcagctaaatcttcaaagttaatttctttattgatctcagattttgtaacaaagacatcaatacggtcttttcttggtgtcacacggaaactaagcattccactatctttgaaattatctggtaaatctaactcgtccattactgagtagaagaactcttctgtcttttcttgtggaatcaaaaagtctttcaactccatgccacgttcttctaaatcttccatactaatcgttatttttagcgttgtctcgctaatctgtttcatttccatactaattacctcgcacgagtagtcattttattatacaagaaaagtcagactttttcaatttttacgctataaaagcagcccttgagaggctgcttagttattaaaagatagctttcaagatactataaacaataagaatcgaacctaaaacgatacgatatttaccaaaaatagtgaaatcatgttttttaacatagtcagtcaagaagcggataacgtaaaggctgacaaggaatgctgttacactagcaaccattaaaattaaaaattgactgaaactaagaacatttccatctaagaagaacttaaccgccttcaaaccactataaccaaacattgttgggatagcgaggaagaaagtaaagtcagcagcaactgaacgacttgttcccacaataattgcccctagaattgtagcacctgaacgacttgtccctggaataatactaagaacttggaagcaaccaatccaaaaagcggttaaataaggcatacgagcaagttcagtaacctgcggttcaacattagcattgcgtttttcaatccagataaaagcaatcccataaacaatcaaagcaatggcgattggaaccatgtaattaaaatgtgcttcaaaccaatcatcaagcggcaacgcaatcaaaattgatggaatacaagcaataacaacttttaaccataattgccatgttaattggacttcacgcgctgttttaccaggttgaaatgggttcaaacgtttaaagtaaattacgataacagccaatattcctcccaattggataacaatattgaacatatccaaaaacgctttgctttggttcaaactgataaactcttgaaccaaaatcaagtgtcctgtacttgaaacaggtaaccactctgtaattccctcaactatccctaaaaagatagcctttagtagttcgaaaaataacataagttctccttaaatttatatctcttcaattatagcagatttgaagcgtttttaaaacgctccgcctccacctccgcctccgccgccagagaatcctcccccgccacctgagccagagctaccagaggaaacggaaaaatgagcagccatgttcgcattgtgactagctaaacctagctgatgagtatgcataccaatcatataacctagttcttgattggttaaaataaccgattcatttgcaagcttgatatcattaaaatcaaggtatttttgcactcgcttagcataaccaaataaagtagcataaaccaagatacgattccaaacaacgacaccttgaatatcaactttatcaaatttatcaatgtcacgcatcatattggtaaagctaacccatgcttgcacacgttgttgaccttcagctgttatgattccatgttcggtagaataatgcatttttcggttaatgtaaagcagcatgaaaatcacaattgctagtaaagtaccgtatatgagaaaaatccaatgctcctgcataaatgaataaacgccgcttaaagttactacgagcattgctaccagtaggaagcgacgtgccaacgaaatggtactcttagttccttcagataattcttgacgaatagctggtaagttttgactcgtcacctctttttccactaacttattaatgctattcaatttagcattgtatcggcgattaaaatcatttcctatcttattaagcttgctttctagtgttttacctttatattgttttttatacttcttcagcaaagtatcatcaaaatggtaatcagcaaagagatcatcaataattattttctcttttccaccaaatgccatatcaatcacttcggcttcataatccatcatcggcatatcaagatgacagaacaactccttatcatcaacgctaataaccttacggtcaatcaaatcaagcaaggttgcttgcatagctgtctcaaaattaaatttttgtggaattgaactgcctttagtatccaaatgttgcaaatccacatcataaatgtatttcaatactaaaagtggcgaccaatcttctggtgcttcgtaagaacgtatttttctatcaaaatgttcgtatcgtctagccagtctgaatgctctgaaaaataccactaaagcacccactatcaatacaataacaactgctggcaagacataaaataacaatacctgtaaaacttgacttctacgagcaattttagcttcttgtttgataatagctgattttcgattcttagacagtaagctaacattttcaaagattgaatggtcccaataagcgtgtaactccaatttgccactaacatttttagctgaaatctgatagccattcgacgttttggtaactgttgttgaattcagataacctgtatgtgcccacaattggcgattagaagtggacttatccgtggttactgtaaaattcacattatgcaaggtttcatcccaatcactgattggtacccagtttaattcgacaacatctgaatacggaaacaacaattgcgataattgccagtgcacagtgaccacaacagtatcaccgcttgaaccagcattataaattttcacttcataaccatcgccaagattagaaactctagtgtcaacttctctgctagttccattaacttctgccgaaacttcaggttgactatttaccgaaaaaccatctggcatattaccagcttctcccaatgttacaatttgcccattataagacgaatcaaactgatacgtaatcatctgaataaaatcagctgaattatcgtcatgtatttctaagacaccgtcataacggctaatactgtagtcaacatcagcattaacctgaacggacaagcccaaaaatgtaacaatagcaagcaaaaataatgttaattttttcatcatctcctactcctttcctctcccttattttaccatatttcattgtataaatattctatttttaggatgattatattgaaatcaaaatctatttcttgtaaaatggtagggtataagaatagacaggagtcttaaatgaaaaagttacttttaagttgttttgcagctgttcttcttctctttggaggaatgactagcatacacgctgacgaataccttcgtgtcggtatggaagctgcctacgctccctttaactggacacaagatgatgattctaacggagctgttcctattgaaggaactaatcaatatgctaacggatatgatgtccaaattgctaagaaaattgcagacagtttaggcaaggaacttctcgttgtcaaaacaacttggacagggttaattcctgcacttacttctgggaaaatcgatatgattgctgccggaatgagcccaactgatgaacgcaaaaaagaaattgccttttcagatagttactacacaagttatcccgtaatcgttgtttctaaaaaaggcgattatgccaatgcaacatctctagctgacttttcaggtgcaaaattaacatctcaacaaggtgtttacctttataacctcattgaccaaattagcggtgcaactaaagaaactgccatgggtgacttcaaccaaatgcgtcaagcccttgaatctggtatcattgatggttatgtttctgaacgtccagatgccatctcagccgaaaacgctaatagcgacttcaagatgatttcctttgaagaaggtcaaggtttttcaacatcagaatctgatacagctattgccgttggtcttcgcaaagacgacacagaaatgctcgctaaagtcaacgctgttttagctggtatttcagaagatgaacgtttggaactcatggataaaatgattgaagaacaaccatctgataattctgaagaagatgaaaacagcaacttcttcactgacatgtggacaattttcaaaaataactggaatcaattcttacgtggtgctggagtgacactcttcatctcaattattggtacagttgtcggtctctttatcggacttctcatcggtgtttatcgtaccgctccaaaagctgccaataaagtattagctggacttcaaaaagctttcggttgggtactcaatgtctatattgaagtctttcgtggtacgccaatgattgtacaagcgatggttatttactatggtactgctcaagcttttggaatctcaattgaccgtaccttagccgctgtccttatcgtttcaatcaatactggtgcttacatgagtgaaatcgtccgcggtggtatcttcgccgttgataaaggtcaattcgaagccgcaacagcactcggatttacccacggacaaaccatgcgcaaaatcgttcttccacaagttgtccgcaatattttgccagcaacaggtaacgaatttgtcatcaatatcaaagatacttctgtattgaacgttatttccgttgtcgaactttacttctcaggtaacaccgttgcgacacaaacttatcaatatttccaaacatttactattatcgcgattatttactttgtcctcacctttactgtaacacgtatcctacgatttattgaacgtcgtttcgatgcggacacttatacaactggtgctaaccaaaaccaaacgaaagaggtgaaataatgacacaagctatcattgatattaaacatttaaaaaaatcttacggacaaaatgaagtcctcaaagatatttcactttcagtaactaaaggtgaagttatttcgattatcggttcatcaggttcaggaaaatcgacatttcttcgttctatcaaccttttagaagaaccaacagctggtgaaatcctctttcacggtcaaaatgttcttgaaaaagattataatttgacagaatatcgtgaaaaattaggcatggttttccaatcatttaacctttttgaaaatcttaatgttttagaaaacgccatcgttgcccaaacaactgttctcaaacgttcacgtgacgaagctgaaaaaatcgccaaagaaaatcttacaaaagtcggtatgacagagcaatactggaaagcaaaaccaaaacaactctctggtggtcaaaaacaacgtgtggctatcgcacgcgccctctctgtcaaccctgaagcaatgctctttgacgaaccaacttctgcccttgacccagaaatggtcggtgaagttttaaaaacaatgcaagaccttgccaaatctggtttaacaatgattatcgttactcacgaaatggaattcgccaaagaagtttctgaccgtgtgattttcatggataaaggcgttatcgccgaagagggaacacctgaacaaatctttgagcatccacaacaagaacgtacaaaagttttcttacaacgtttcttaaaataaagtttaaatacaaagctggagacaacaacgtcccagctttttttagtttctaaatagcataaaattgctaacatttttcaaaaaaatctttttaatgtaattataagtttcctagcttatactaacgataataaaaattaacccgactattaatcactagaaggaggaaatcaaaatggcaactttaaaaagaagtatcatcaatatcgcattaactcttgtatcttttgctttttcaagttggttttatgaacactatctgatgacttatacccattacatttcctcttatggtgtctcatttacccttgccttaaatactattattacactgattttaacttatttcacgttcattctaatgcacttagtttatactaagaagattacaagtttgacagtcgctgtctcttacttcatttattttatgattttgatttacgtgattttgctgaaaaatatcggtatccaaggctattcttttaatccattatcgtttatttctgactttacaagtggcagccgctttgttcctattatgaaccttgtgatgtttataccgttgggctttcttttccgaccttccaaagaaaattttatcctagctttctttggtttactgacgattgaaacagcccaatacgttttccaccttggtatttttgatttaggagatgtcacccttaacctcttgagcattggtattggcactatgctacatcaaaccgctttaagaaaatggttaagtcaatatatcacacaaaaaataatcaaattctcttaaaaaaatttagtataacacaaaacgctttaccagttaagtattttgtgttatactattttctgttaacgttaataaatctatcacaaggaggttggtatggctgaaaaagttgatttagcatctgcttatcgtagattaaaaagtcccaatataaaaacacgaaaacgtgcattgaaaatcattcatgattataaacgcttcagaaaagcaaattaattccttacattattaatccctaacattgccagattaaaagacctattgcaaggcttccttccgcctgcaataggtcttttttggttattattttgccttcaatgatgacaaaatttgggtacgaatatcttcgattccctctgggtgatttggcaagaaaagtgtttgattgcctttagccgcaaaagtatttagcgtatcaaggtattggttggtcaaaaggatagacatgatttgttcttctgtcattccaacattagcatctttcaattcttggattgattcagcaagaccatccacgatagctttacgttgttgtgcaataccaacaccatgcaaacgatctttttctgcttcagcttcggcagctgtgacaattttaatcttatcagcattagccaattcttgagctgccacacgtttacgttgtgccgcattgatttcattcattgattgtttaacttcagcatctggttcaactttagtaatcaatgttttaacgataagataaccataagttgacatttcttcagccacttgatgttgtacttcaagcgcaatttcatcttttttctcaaataattcatccaaagtcaattttggtactgatgaacgtagggcatcttcgatgtatgacttaatttgagcttctggacgcatgagtttgtaataagcgtcggtaacattctgttcattaacacggtattgtgtagcaacattcaaagtcacaaaaacattatccttggttttcgtttccacaacgatctcagattgcaaaagacgcaactgaatacgcgcagcaattttatcaattccaaacggcagacgcacatgcataccactaccagatgttgtttggtatttcccaaaacgttctataataacaacagtttgttgacgcaccacataaagcgtgctagcaacaacactcaaaataacgataagaaaaatagctaaaacaattaaaatcatgataaatctcctttaaaattatttctttttactactaaaaatcgcacatccgatagtaataaaagaacaaaaaataataaaccacactgtattcataagctccccctcttgtacccattaattaatacaattatatttcatttctctaaaaagtcaagcaaaaagacataaaaaaacctagtcagggtgtaaaccataactaggcttcgtcgttatcaaacgagcaaattataaagactttcgttcccatgtaaattgatgtaagaaggatcaaatgctgacaaacgatcaatcaaagcattgtaatcatttttatcacctaaagtaataccaatcagaactggtcctcttcctttattggcacgtttgatgtactcaaaacgcgtaatatcatcatttggtccaagaatattatttacaaattcacgtaacgcacctggacgttgtgggaaattgaccacaaagtagtgtttgacaccgtcgtaaataagcgcacgctcttccatttcttgcatacgattaatgtcattgttcccaccagaaatgatgcaaacaattgtttttcctttgatgtcatctttcatcacttcaagtgctgcaattgacgctgctccagcaggttctgcgataatcccttgtttagagtacatatcaatcaatgtttcagaaatcaaaccttcgtccacaccgaccaatttatcaacatacttgcgagctgtttcaaatgttttatctccgactttttgcacggcaataccgtctgcaaatttatcgatttcttctaatttgacaggatgccctttatcaaaggcagcacgcatactacgagcacccgaagcttccacaccaacgacttcaatttcaggtgccacatctttaatgtaagtggctactcctgaaatcaaacctcctccaccaactggaacataaatttgatcaaagacaacaccttcttcttgggcttgctcatagatttcataagcgaccgttccttgaccagcttgaacatcttcgtcatcaaacggatcaataaaggtcatcccttccgacttagtgaattcttgtgcagcttgtgcggaagcatcaaaagtatcaccaacaagcttaatagtgacgtaaggtccaccaaaaaatttaacttgtccaattttctgttgcggcgtcgtaacaggcataaaaattgttgcaggaattttcatctcatgacaagtaaaagcaacaccttgtgcatggtttccagcagaagcacaaaccacaccacgttttttctcctcatcagacaactcatggatagcataatatgccccacgaattttaaacgaacgcactttttgcatattttcacgttttaaataaactgttgcaccatatttttctgacaaatagcggtcaaaatcaagcggtgtacgctcaacaacaccctttaaaacgtcataggcattgacaacatccttagctaaaatcataaaccaaccttcttatattcaaaaatttcgatttttctatgcacacatagaaaacttaaaaccatttagtcaactaatagataaaaaaccgatgacaaacatcggcattttatcagtaggtttcttcaaaaattagttataaattttgaatgcgtcgtcatcgttttgtccaacaaatggcatcgctttacgaagttcgctacccactttttcgatttcaaggtctgcagcttctttacggtaagcttcaagttttggacgacctgctttatagtcattaacaaagtcttctgcaaatttaccagattggatatcagcaagaacggctttcatattttctttaacatctttagtgataacacgtggtcctgatacgtagtcaccaaattcagctgtatttgaaattgattgacgcattttcttgaaaccaccttcgtaaataagatcaacgataagtttcatttcatgaagaacttcaaagtatgccaattcaggagcataaccagcttctgtaagaacttcaaaaccagcttcgataagggcagttaaaccaccacaaagaactgcttgttcaccgaaaagatcttcttcagtttcttctttgaatgttgtttcaagaagtccaacacgcgcagcaccaacacctttagcccagtccatagcaatatctttagcattaccagtagcatcttggtaaacagcgtaaagtgctggtacaccaaatccttcagtgtaagtacggcgtacaaggtgaccaggtcctttaggagcacacataaaaacatctacagtttctggagctttaatgtattcaaagcggatattgaaaccatgggcaaatccaagagcattaccagcttcaaggttaggagcaatttctttggcataaaggtccgcttgaatttcatctggtgccaaaatcatgataacatctgcaagtttagttgcttctgctacttcataagtatcaaaaccatcttcttttgctttatcaaatgatttaccatggcgaacaccaatgataacatcatgacctgaatcacgcaagttttgtgcatgggcatgaccttgtgagccataaccaataatagcaatttttttaccatcaagagctgctacttttacatctttttcgtattccattgttactgccataataaatatctcttttctattttttattttaaatgcccaaggcatcagagttaactaaattaatgtttatcaagaaaaatctcttgagaatcctgtcgcacctgtgcgagcaagattttgaataccatacggttttactacacgaagaagtgcttcaattttatccgcatcacctgttacctgaatcgtaattgattttggagcaacatcaacaacactggcacggaatggctgaataacagccagaatttcagcacgtttgcttgttggcgccgttaacttaaccaaaatgacttcacgttctaagtgaggaatatccgtaatatcacggacacgcagaacatcaattaaacgatttaactgtttaataatctgttcaacttcttccaaactctcaacatcaatgataattgtaattcgggaaatgtttggttccatagtatgcccgactgaaatagactcaatattaacctgacgtcgtgaaagaacacctgtaaaacggttaagaacacctgttgaattttgaagcttagctgtcaacattctacgcattaaacttcacccccaacatctcactatttgatttaccagttggaaccatcggataaacgtgttcacgattagaaattgcaacctcaactaacattggcttattctcagtaataactttcaaatcttcttccaaagtgttaggatttgtaaacttataatgagcaatgccgtaagcttctgccattaattggaaatttggttcatcatcaaatgttgattcgctgcggtgttcatcatagaatgattcttgccactgacgaaccataccaagtgaatgattgttaatcaagactaccttaattggaacaccgtaaccatttagcaatgccaactcttggttagtcatttggaaaccaccatcaccaacaaagacgataacttctttatcaggattggctagtttagcaccaatagcagcaggaattccaaatcccattgttcctaatccaccagatgtaatgagttgacgtgcatttttatatgggtagaattgtgctgcccacatttgatgttgaccaacgtcggtaacaacgatagcatccccatttgttatcttaccaattgctgcaatagcatgctgtggtttgataatcgtttcatcgaaatcatagctaaatggtgcttttgctttattagcaagaactgattctgtccaatcatcgtgacgtgtcttaacttcatctgcttcaaggagaatttccaaagcacgtttggcatcacctacgataggaatctgtgtttttacaactttcccaatttctgcagggtcaatatcaacgtgagctacaactgcttttttcgcaaatgtctttggatttcctgttaagcggtccgcaaaacggcaaccaaaattaatcataaaatcacactgcgttaacgccatattagacgcgtatgaaccatgcattcctcccatacccaaagataagggatgatcaattggcatagctcccaagcttaataacgtagaaacaactggaatattataacgttcggcaaaggcaattaattcttgcgaagcccctgcatagttaacgccaccaccagcgataatcaacggtcttttagcctttttcaattgagttaaaattttcttcacttgaagcacattaggttcaaccgttggctgatagctaggaagattaaccgttgggtcatgataaaagcttgttttcgtctctgaaacgtcttttggcaaatcaataacaactggacctgtacgtcctgttgttgcgatatgaacggcttctgttacaatgcgaggcacatccgcaacatcgcgaatttgataattgtattttgtaattggcattgtgataccgataatatcagcttcctgaaaagcatctttcccaatacctgacattccaacctgtccagtaaagacaagcattggaacactgtcactcatcccgtcagcaataccagtaatggcgttagttgcacctggaccactggttacaatggcaaccccaagttttcctgttgatttagcatatccttctgcttcgtggagggctccttgctcatgacgtgccaaaatatggcgaataccatcaaaattatatatagcgtcataaagcggtaaaacagctccaccaggatagccaaaaattgtatctattcccagactagctaaggtctccaatagcaattctgatccgtttttggattcttttaatctaatctgtttcacaaagtcctcctttgcatgtaaattccgaattatctaaaaattccaacagcttgttactataataacatttaaaaaaaataaagcaagtgaaagtgagcaaatatttgtccactttcacaaattatttttaactttattctttatcctgactttcacgttcagctttacgttcttcaaattcttcttgggtcatcattgaaccaccaaaattcgcagatgaggcgaaagccgtgtaacgacgtaaccaaccgcttgaaatttttgatttgaatggttttaagtgtttacgacgttctgctagtgttgcatcatcaacaagcaaatccagtgtacgattagtcaaatcaatatagatttcatcaccgtcttcgataagggcgatattaccaccttctgccgcttctggtgaaacgtgaccaatcgcaataccacgtgttgctccagaaaaacgaccgtctgtaatcaatgccacatctttaccaagtccacgtccaacgattttagaagttggcgcaagcatttctggcatacctggaccaccttgaggtccttcgtaacgaataacgacaacgtgaccttttttaaccgttccattatcaattaattcaagggcttcatcctgtgaatcacaacagatagccttaccacggaaggttttaacagatggatcaaccccaccgaccttgataacagcgccatcttgggcaatgtttccgtaaagaattgacaaaccacctactggtgaaattggactttcaagtgggtgaatgatttcctcatttttgatttctgcgccagctacattttctttcaatgttttacctgtaactgtaatgcggtcacccttaattgttccttttttaatcaattgattgataatcgctgaaataccgccagcttcttgaacatcgtgcatggtataaacgcttgatggtgcaattttagacaggtatggcgttttcttagcaatttcattaatatcttttagattgtactcaatacctgcttcacgcgcaatcgcaagggtatgaagaaccgtattggttgaaccacccatagccatatcaagggcaaaagcatcatcaatagcttcttttgtgataatatcacgtggacgcaaattatttttgacattgtccatcaaatgttttgctgcttggcgtaccaattcacgacgctggtcagaaacagcaagaaccgtaccatttccaggaagagcaagaccaagcacttccataagagagttcatcgaattagctgtgaacattcccgcacaagaaccacaagttgggcaagcattttgttctagataatctaattctgtttttgacatatcgccagcttgatatgttccgaccgcttcaaaaaggcttgataaagtcgcttgatgtccagtcatatcaacgccacctttcattgggccacctgaacagaaaactgcaggaacatttgtacgaagggcagctagaatcatccctggcgtaattttatcacagtttggaatgtagaaaacaccgtcaaaccaatgcgcattaataactgtctcagcagcatccgcaataatttcacgtgatggaaggctataacgcatcccaatatgccccatagcaatcccgtcgtcaacaccaattgtattaaattcaaaaggaataccacccatttcacgaatagcttccttggcgacatctgccaactcacgcaaatgaacatgtccaggaacaatatcaatgtaagaattacaaattgcgataaatggtttttgcatgtctttagcagattttacttgcccggttgcataaagaagaccacgggctggtgctttatccacacctaccttaatcatgtcacttctcatctgttttctcctatcaattaaatcttacactccatgttaacactttataaaataaagtcaagataattttcagaaaattttgttagttgaaaattttttctcttttcaaaatataagcaccgttttctattatataataggataaattgattctattatagataaaactattttcctataaaaacaacacatttcttacataggtattgctctttgagggcagaaaaaaagagcctgaattgttcagactctctttattatgtttttattcaacactcatcaagtatggataaactggttgtttaccatcatgaatttcaacttcaacatcttcgtaagttgattcaagatattcagaaatttcttctgctaattcttgatttccttcttcaccaacgtaaatagtgatgatttcactatcttcgtcaatcattttagcaaatgtttctttcaatgtagttgtcatatctggatttgaaaccacgattttaccatcaaccataccaaggttgtcatctttgtggatttcaagaccatcaatagaagtatcgcgaacagcaagtgtcacactaccgctaacaacgtcagaaaggctagctgtcattgcttcaacattttcttccaatgattgtgcggggttgaaagctaacaagcttgtaaatccttgaggtacagtacgtgtttcaacaactgctgctggcacttcagacacttctgctgctgattgtgcagccatgaagatatttttgttatttggcaagataataacatttttagcgttaacagcatcaatcgctttaacaatatcttctgttgatgggttcattgtttgaccgccagaaataacgtagtcaacgccttgtgatttgaagatatcagctaaaccgtcaccagcacatactgcaacaatagcaaagtctttttcttcttggctaatagctactgcttggtctttttcaagaacagcgtcgtgttggttacgcatgttatcaactttaacttttttaagcgcaccatatttaagcccttcttgaagaacaaggcctggatcttcagtatggacgtgaactttagcaatttcatcgtcgttaacaaggataagtgagtcacctaaaccactcaaataaccttggaactcttcatagttaaactctttaacataagtaggaccttgtttaagtgcaaccatgatttcagtacaataaccgtatttaatgtcttcagttgcaacgtgttcagctactgatttgtggtgttcagcattaatcatttcagtcattaccgctggagttgctttgaaatcttcagaagcaatgtattcaccagtcaaagcagctaaaaatccttcataaataaagactaaaccttggccacctgagtcgacaacaccaacttctttcaaaacaggaagcatttctggtgttttagccaaagcacgtttagcaccatcaagtgcagcacgcattacttcaacagcatcgtcagtttcttcagctttcttaagagcggcagttgctgctccacgagaaacagttaaaatagtaccttcaacaggtttcataacagctttataagctacttctacccctgattggaaagcatgagctaaatcttgaccagttaactcttctttatctttgattgcttgaccaaaaccacggaataattgagatgtgataacacctgaattaccacgtgctcccatcaaaagaccttttgatagaatttgtccaacttctccaacagtacttgcaggtttatctgcaacctctttggcaccattttcaattgtcattcccatgtttgttcctgtatcaccgtctgggacagggaaaacattaagggagtttacatattctgcttgatttccaagacgtgtgctagcagcttgaaccatttcttggaataaactggttgtaatatttgacactaatcttctcctacaactttaatattttgtacgtaaacattcaccgtatctgctgaaaggccaagttggttttcgaggttgaacttgacacgttcctgaatgttttttgatacttcagaaatttttacaccatatgacattacagtgtaaacatcgactgaaataccactttctgttgatttgacaacaacaccttttgcgtagttttctttacgcagaagcgcttgaaaattatccttaagagcacttttacttgccataccaacaacaccaaaaatttctgttgcggaacctccaacaacagttgcaataacgtcgtcagataactcaatttggccatcttttgtattaattttcacagtcatatttactacctcaaaagtttttatcagtttattttaccatatattagccgtcttgtaaaaaataataaaagattaccggctacaaaacaaagaaaaaagcctttcggcttttcattttatacgcgttctactttaccagatttaagcgcacgagctgatgcccaaacttttttaggttttccattaacaagaatagtaactttttgaagatttggtttaactgcacgttttgttttgttcattgcgtgtgaacggttgtttcctgatacagtcttacgacctgtgaaataacaaaccttagccatatttatctgcgtcctcctacttagattataggtgctttacaccacataccataaaataatatcatattcaccatgttttcgcaagctttttagcaaataatcagcaaaaataattgcgaaagcactaacaatttcccagcttcaaactgatttccgccagaaattctaaaacattttgtaaacaaaaaatcctgatgattatcaggatctaaaattatctgccgattgcaggaatcgaacctacgacctacgcgttacgagtgcgttgctctaccgactgagctaaatcggctaacaaagacattatatcactcagctaaaatttgtcaattaaataataacaattaacacaaaaaacaaaaaaactccccaaatgggaagtttttctaaaacgaagtttgattaagctttgttagctgaaccaaatacgtcgatacgttcttcaacagcttctgtaatagcttcgaaacctggtttcaagaatttacgtgggtcgaagagttttttcttatcgtattcttcttcgtttgcttcgtattcagcaacaaatttacgagtagctttagcgaatgcaagttgacattcagtgttaacgttaactttagctacaccaagtttgatagctgcttgaatttgatcgtcagggatacctgatccaccgtgcaatacgattgggaatccaggaacagcagcagttaatttttcaaggtgatcaaggtgaagacctttccagtttgctgggtatggaccgtggatgttaccgatacctgctgcaaggaagtcgattcctgtagcaaccatagctttagcatcttcgattggagcaagttcgccgtcaccgatgataccgtcttcttcaccaccgatagtaccaacttcagcttcaactgagatacctttagcgtgtgctttagcaacaacttctttagctttttcaaggttttcttcaagtggaaggtgtgaaccgtcgaacataactgaagtgtaaccaacttcgatacattctaatgcatcttcaaaatgaccgtggtcaaggtgaatagcaactggtacagtgatacccattgattctacaaggttttcaataagtgctttacaaagtttgtaaccacccatgtattttgcagcacccattgaagtttggataaggattggagcttttttagcttctgctgcacgtaaaattgcttgagtccattcaaggttgtttgtgttaaatccaccaactgcatatccgttgtcacgggctgctttgacaaatttttccgctgaaacgattgccattatataggcctcctatttattttttgggataatcccttttacacgtacattttatcacaaatctcatcagattgctagcgttacttgaaatttgactgattttctatgaaaaaacgcccacaaatgacaaaatttactgaaaatgaaagccttatttcatactattattttccattgaaaacaaaaaaagacaagcctttgcttgtctgctctgcggaaagagggacttgaaccctcacgatctaaagcgatcacaggatccttagtcctgcgcgtctgccaattccgccatttccgctgttccttaacaacatataaaattatatcaacttatctttttgctgtcaacactatttttcatattttttcaagaaagttgaaattttttcaatgtatgcttgaggatcagtttcaaaggatttggcatgtcccgcacctttaacgatatacaattccttctcgccttgtgtggcttgataattcttgtaaaccatacttgttggcacaaaagtatcatcactgccatggatgaaaagaactggacgtgtgttattttttaattgattcacactacttgcttgaccgtaagaaaagcctgcacgaatttttgaaatggcagatacttcataaagaattgggaaagctgggagattatacatttctttagcttgatattttaactcatcccagacactactataaccacaatcttcaataatattaacaacttggtcaggcaaactttcttcaccagaagccatcataactgttgctgctcccatagaaacaccaaacaaggtaatttcgctgtctgaattttgttcaactagcagctccgcccattttatgacgtttaagcggtcgttccagccatatccaatgatttgcccttcgctgtctccatgcgacatattatcgggcataaggacattgtaacctagctcatgaaacatccatgcataaggcttcatatcttccttatcgtttgtaaagccatgaacaacaataaccgttttatttgttgctgtttctgcaggaacataccaagcatcttgttttaaaccttggttggtcatccaaagcgtttcttttgtcagttggtcaaaactctgctcataggcgtagagaggattgtcttttgaacgaccattattattaatgaatgatttttcttcacgaatttgtgctacatggaaaaaataaaaacttgctccgacacttactacaaaaagtagagcaataattcctaataaaacacgacgttttctaattcttatttttctcatgctcactattatactattttttcctaaaaataaaaggggtacagattcattagaattgtattatcaaaaaacactcccaagcttttagcttgaagagtgttaatctgttctagtgattatttgctattttcaatcgctgctgtcacaaaggctgtgtaaagctcttctggacggtttggacgactttgaagttctgggtgatattgagcagccacgaagaattttttctctggcaattcaacaacttccatcaagcggttatctggtgatacgcctgagaaaacaaaacctgcttcttcaaattggtcacggaatttagtgttaaattcgtaacggtgacggtgacggcgttgaacaacttcttgattgttgtaagcttgtgctgcacgtgaacctggttttaatttacatgggtaaagcccaaggcggagtgttccccccatatcttcgatgtcaatttgatcacgcataatatcaataattggatatttagtatctggatcaagttcggctgaatttgcaccttctaagttcaatacgttgcgagcaaattccacacaagtcaattgcataccaagacaaataccaagcattggcacatctttttcacgcgcatagcggattgcttcgattttaccttctgtaccacgttgaccaaatccacctgggacaatgataccatcagcatcaccaagcatttcttcaacattgtcagctgtaagatcgttggcattaacccatttaaggtcaatagccgtatcattaacataacctgagtgtttaagagcttcaacaactgaaaggtaagcatctggcaattcaacatatttaccaacaagagcaatcttagttgattttttaagattcataatcttatcaaccattgcagaccattctgacatatcagcttttggcacatccaatttcaagtggtcacaaacgatttggtccatattttgagcttgcatattaagtggaatttgataaatgtgatccacatcaagcgattcaataacagcttctggagcaacatcacagaattgtgccaacttatttttaatgttttgaccagctggtttttctgtacggataaccaacatattaggttgaatcccaaggccacgcaattctttaacagaatgttgtgttggtttagttttcatttcaccagcagctttaaggtatggaagaagcgttgtgtgaatgtacataacattgtcagcaccaacatctgctttcatttggcgaagggcttcaaggaatggaagactttcaatatcaccaactgtaccaccaacttctgtgatgataacatcagaatcagttgttgtcgcggcacgtttgattttttctttcaaagcgtctgtgatgtgcgggataacttggacagttgcaccaagatattcacctttacgttctttacgaagaacttcgctataaattttaccagttgttacattagaatatttgttaaggttgatgtcaataaaacgttcatagtgaccaaggtcaaggtcagtttcagcaccatcgtctgtcacgtaaacttcaccgtgttgataagggctcattgtacctgggtcaatgttaatataagggtcaaatttttggatagttactttaagaccgcgatttttcaaaagacgaccaagacttgcagccacgattcccttaccgatagaagaaacaacaccaccagtaacaaaaatatacttagtcattaaataaaactccttttaaataaaatgatagcaaacgataagtgcttgaagattaagaataacaacaaatcaaaacatccataagatatttgataaacgaagagactgaaataaagtattcatcttctctgtttgtgtaattataattgcaagacgcagtggttgagtggattctaatgcgctgataaatcagcttttacaaccctactcaactgtgcgggggtgggacaacaaaatcgaatttcttcgaaattaccgatttttgtcccactcccaggaaaacaaaaatagctccctaaaaagttagggagctttcatacgacctctaaaaaagaggtgcccgaataataatataaactatcctgtggcgtttgtcaaatgataattgacaactttttttaatttagtaaaaaactaatgctgatgattactcttcatctaaatcatcgtcttcgtcatcttcttcgttgatgtcaacttcttcgtccaaatcttcatctggaataatttcgttgatttctgaatcgtatgactcaacttctgatttttcgtcatctggattttcttcatcgtattctaaatcagatgattcaggtgtgaaatcttcatcttctggatcatcatctgaataatcaatggcatcttcatcaccatccatgaaggcattaacacgttttggtttgcgttttggtgcaccattttcatcttcttcaagagtgatgatttcttcgtcaatttcatcaatagcataccatgaacggagcccccatttgttatccccaagtggaataaaacttccgtcaacgttcaatgcagaataaaaatatggcaatgcttcacgaatttctgcatctgatttttcaaggtagttttggatctcatttacaagatcgctgaaatacatttcatgatcacgtccgcgttcttctaaaatcgcacgggcaacttcaatcattgaaagttcgcttttttcttgtccagcaaatacttctaattccaaggtagttctccttattatttaggatatgagcaaatagccacaaaaaccctattatcttaattttcgttactctctattttacgctaattttgtcaattcgtcaaaagatttataagaatttctgataaagggcataaaagccaagtaatcttacgattacctgactttataggtatttatctaagataaattattttacttttgcagtgcttgtgacaacgtcaacagctttcttcatagcgatgtcgtgtttaagcatatcagctgaaagaagattacgaacttgttcaacttccatgttgtattctgaagcaaggtcgttgatttctttttcgatttcttcgtcagaagcttcaaatccttcagctttagcgatagcttcgataacaaggttagttttaacacgtttgtcagcgtcagcttcgtattgtttgtgaaggtcttcttcagttgtaccagtcaattggaagtacatttctggagagataccttgacgttgcatgttgcccatgaattcgttcatagcacggtgcacttcgtcatgtaccatttcttctggcaattcaacgatttcagcgttagcaactgccaattcaagtgcagcaccttcaacagcgtcatcgtatgcaatttctttagctgcttcaagttctttacggtatttagctttcaattcgtcaagagtttcaacttcttcgtcgatgtctttagctaattcgtcgtcaagagctggaacttctttagctttaacttcgtgaacagttgttacgaatttagcatctttaccagcaaggtcttctgcttggtagttttctgggaatgttacgttaacctcaacagtttcaccagctttagcacctactaattggtcttcaaaaccagggatgaattgacctgaaccaagttcaagtgagaagttatcacctttaccaccgtcaaattcaacaccgtcaactgaacctacgaagtcaataacaactgtatcgccaagttctgcggcgtcttctttgatgataagttcagcaaggttgttgcgttcgcgttcaactttttcgtcaacttcagcatcagttacttcttttgtagcttcaactgaaacttcaaggtctttatagtcaccaagttttacttctggttttgtaacaacttctgcagtcaatgtccattcttgacctttttccattgattggatgtcaatttttggttgagcaacaacatcaaggctaagttcagcaactgctgcttcgtatgctgctggaaggatagcgttcaaagcatcttcgtaaagtgcttcttcaccaaatttttggttaaatacggcacgtggcatgtgtcctttacggaatccaggtgcatttaaatttttcttaactttgttgaaagcttgatcaagagctggttggattttatcttgaccgattgtgaatgtaatcacgccacggttagtagctttgttttcaaatgatacagacatgaagtcatttctccttaaaattttatatacagtttagtttaccatattttacgggcttttaaaagttttttgtgtaaaaatcctaggtcaatcgccactctatttgcggaattgctgcgtattagataggctcttaatgacattgcagtcaacttttctcattttactgtcctacataaaacttttggtaattcttaatttatattaaaaacttgcttgctattcgtttttttaataaactaagggtatgaatattatctctaaatatctcgaacaattacaaatcgaacaaatcgctgtggatcttatttctaaggcggtttcattgatacttctttttctatttttcttaattgtaaagcgtgttgctgattttatttttaaacatgcggtagaaaaatcaattacgctttcgcgccaaacggaagctcgccaaaagacaatcagcaaacttttgcacaacatcatgaactacaccatctactttttcctactttattgggtgttgagtattcttggtgttccagtttctagtttattggctggtgctggtcttgctggggtcgctattgggcttggtgcacaaggctttttaactgacgtggttaacggattctttattcttcttgaaaatcaatttgaagtcggtgattctgtcgttattggaacagttgaaggaaatatttcaagcgtcggtattcgtaccacacaaattcgcggtttcgacggaacacttcatttcattcctaatcgtaatattactgttgtttctaacaaatcacgtggtgatatgcgtgttcagattgatattccaatctacgctcacacagacttagaaaaaatctcaaatatcattaagacgatcaacaaagaacagctaccatcttatcctgaaatcgttggtagtccaaccattttaggaccacgtacaaatagcactgcacaacttgttttccgtgttgatattttcgtgcaaaatggcaaacaaagttacatttattctaacttttaccgtctttaccaagaagcgcttttggaaaatgacattgcattgccaacgatgtatgccaacccgacacttacaaaatagaatattatatcataaaagaggacgccaaccgtcctctttatttatttttaaaattttcgaattgggtctgatgtataggttgcacgcgcgccaccaattaattttggtcggctcgctaaagcagtcacatgagcaccgcccaactcacgttgcactggaattagcggcacttgtacgcgcttgacatgcataccaataaaggtatctccaatatctagcccagcatgtgccacgatttcttcaacctcgacagggtcttgcatgaacttgaaagcagcgacttgtccgcttccacccgcatgcagattcggaatgacattaacgatttctaattcttttttctcagctaattcgcgttcaatcgtcaaagcacgatttaaatgttcacaaccttgcacagctagataaatcccacgctccttcaacacctctaaaatcgtcttaacaatcacttcaccgatttcagcactgctattttttccaatcaaaccacctgcaacctcgcttgaggacaagccaagaacaaaaatttgaccttttttaatagcagagcgttcaacaatatcaatcacaatagcacgtgtttgcttttctaattcttgtaggttcacgtcaatcctccttttacttcattatacactaatgtttttcaaaacgcagataagcaagatagacaaggtaaccaacaaacattccaaagaaattttgtaaaacatttcctaaaatacctgcccaagcagcacccaagccataccccaacagcaaggcggctacaaaataccagccaatcattgaaacactagctagtacaagacccagaatacgttttttcccactccagcctgcaaaaaatccttgtgccccatgtgcaatcagactatgaaacatatattgtggatagcccagcaaaaggtcaataagaaatccagataagccaccgacaattgctccagattttgaacctaaataataagcagtaaaataaattccaacatctaacaaggtcaaataacctgttggggttggaacatgaatgtaagccaaaacaacactcaaagctgtcaaaacagccattaaggttaagtcacgcgtattagttttcttcataattttgtttcactccatattggtctgaatgacgaatcgcttgataaacgaattctttagattgttcaacagcagctttggcagactttccaagcactaattggcttgcaatgcttgaagcgaatgtacaaccagcaccgatattattattttcaaggacaggtgtctcaaaaacagtcacgttttcaccgtcgtaaaaaacgtcaatcgctttttccttacttaatcggttgccacctttaacaactacgtttttcgctcctaactggtgcaattttttcgccgcagctttcatatcatccaaagttttgattgaggtttgggtcaatagctcagcttctaccaaattcggcgtgataatggtcacatatggaaaaaatttcaagagttcatcacgaagcgctgaaacttcaacatcatgtttttctttacaaaccaaaactgggtcaagaacaattggaattccaacgtgcgatttaacgaattcaagtgctaaatcagcaactttcacgtttggcaacaaaccaagttttatccctgaaaaaggaacatctttgagactatttaattggtgagaaaagactgtctcatctgtcgcaaaaacatcaaatccattttctgtcaatgccgttaagcaagttaccgctagaaaaccatgcaaatgattggttgtataggttgccaaatcagcatagagaccaccgccactaaaaatatcatttcctgaaatggctaaaatgtacttattcgtcataattaatctcctttaaataaagaccattccccgctgccgtaggacctgctaaatcacgatttttcgactctaaaaccgtcttaatctgactaactggcatacgaccattaccgattttcaacaaggttccaaccatattgcgaacttgcttgtaaagaaagccattaccactgaatgtaaacacaaagaaacctgttttgtcatcaatagcaactgttgctcgcgtaatcgtgcgaactttattttcaacagaagtcccagaagccgtgaaacctgtaaaatcatgcgtccctaccaaatccttaatggcttcttgcatacttgtcaaatctaggggataaggataatacgtcgcataatgtcgcatcattggatttttgggtcgcccagcatctactaaaaactcataagtcttgctgtgcttattgtaacgggcatgaaactcatcactgacttgctcgactttcaccacatctatatcttctggagactgcgtatccaaaccaaatcgtaatttttccacatcacgcgcctgtggcaaatcaaaatgtacgacctgtccataagcatgcacccctgaatctgtacgaccagcaccatgcactttaactggattaccactatttaatttctgtaacgttttttctaattcttcctgaacagaacgctcactcggctgtcgttgaaagccagcaaaaagcctaccgtcataggaaattgttgctttatatcttaccatgagtgtattttatcatcttaacaaaagactttccagaaaatttagaacaaactgtccccatacagaattttatataaaaaagagattggaaatgttagtttccaatctctgtgagagtttattcaccgtcaaaggcatctttcattttgttaaagaatccttttttcttaggattaacaactttatcaccacctgctgctgcgaagtttttaagcgcttcgacttgagcatcattaagtttggttggtgttacgatattgacggttacatgttggtctccttgacctccaccacgcaatttcggagcacctttacctttaaggcggaatgtcttaccagtttgtgttccagctgggattgtcatttcaacatcaccatgcaccgttggcacttcgacagtatcaccaagagctgcttgaacaaagctaatattcatgttgtagtaaatggttgagccattacgttcaaattgcttacttggtaaaacattgataataacgaagaggtcaccataaggtccgccgttaaagcctgcttcaccttgaccttgcaagcgaatttgttgaccggtttcaacacctgctggaatcttaacagatactttatgagttttcttttcatgaccagtaccatgacaagtatgacaagggtctttgatttctttacctgtaccatggcagacatcacaagttacttgacgacgcatcataccaagaggtgtttgtgtatcaacattaataactcctgaaccatgacaacgactacatgttacagggctagttccaggtttagcacctgtaccagaacatgttgaacaagttgattcacggttataagccacttctttttctacaccaaaaacggcttcttcaaaactcaaattcacacggtattgaagatcatcaccttgacgtggcgcatttggattacgcatgcctccaccgccaccaaagaagcttgagaagatatcttcgaaaccaccaaagccagcaccaccatcgaaaccgccaaatccaccagctccgccaccgaagccgccattagctcccgcagcaccatattggtcataagcggcacgtttttgctcatcacctagcgtttcataagcctcttgaacttctttgtacttttcttcagcaccaggttctttgttaatatctgggtggtacttcttcgacatttttcgataagcttttttaatctcatcttgcgaagcgtctttagaaacacccaaacgatcgtaaaattctgtattgttcatattaaataccttatttattttttattctgacaaatttaaacttctaaaaattcgccacagggtacaaactcaagcattgctgtaaatttggaatctttgaaaatcatcacgattgttcgaaacaagccttaaattccgcaaattcttcatctgacatgttaaaaatcaattcttctgaaggtttttcgactatttctatatcatcacacaaccctaaagtagccaatactttcttagcaaattcttgatgtgcgaagccgattgctgtaataatatttttatcttgatgaatcgtttttggcataaagttttccttggaaagaaagtcaaaatacccaaagaaattttgccatataccaccagtaaaagtaatatcttccaataatccagctttcgctaaaagaattggagctgatgatatggcagcaattacaattgattttccttttaattgtttcaaaaactgaatcaataattcatctttcaaggcagaagtaaaatctgacatccctggtaaaacaatacacgaatattcattcaactccacttcatcaaatgtttttgtcgcctgacaaatcaagccgtcctcggaaagtatgttttctttgttagcagcaatgtaatcaactttaatgccatattgtaatactaaactacttgtcaaatcaacaatttcatacaatgaaaaatttggataaatgacacaagcaactttcttcattctgaactccaaattagcattctacccaaaagcagaggctgggttacaacctctgcgtttagatttatatttcaagctttgagttttaaccctaacgtaaaataacctaatagaccaaattatttttcagtaaactcaccgtcaacaacgtcatcaccattgtttgatgaatcagttgattgtgcactttcagcacctgcttgtgcttgttgtgcagctgcagcttgttcgtacaatttcacagcaagagcttgagctttttcgttaagagcttcaagtttagctttcatatcttcaagattgttagcttcttgagcagctttcaattcatcaagagcagattgagcagcatcacgttctgtatcaaagcctttgccttcagtttctttgattgttttttctgttgcaaagatagcttgatcaacttcgttacgaaggtcaacttcttctttacgtttagcatcagcttctgcgttagcttctgcatctttcatcattttttcaatttcttcatcagtcaaaccagaattagattgaataacgatgtgttgttctttttgagtaccaaggtctttagctttaacagacacgataccgtttttgtcaatatcaaatgttacttcgatttgagggataccacgaggtgcagctggaatatcagtcaattggaaacgaccaagagttttgttatcagcagccattggacgttcaccttgaagaacgtgaatatctacggctggttggttatcagcagctgttgagaacacttgtgatttagatgttgggatagttgtgttacgatcaataagttttgtaaatacaccacccatagtttcaataccaagtgacaacggagtaacgtcaagaagaacgacatctttaacatcaccagtgataacaccaccttggatagcagcacccatagcaactacttcgtcagggttaacagatttgtttggttctttaccagtttcagctttaacagcttcgacaacggcaggaatacgtgttgaaccaccaacaaggataacttcatcaatttcagatattgaaagaccagcatctgacaaagcttgacgaactggagttttagtacgttcaacaagatcacgagtcaaatcatcaaatttagcacgagtaaggcttgtttccaagtgaagaggtccagcagctccagcagtgatgaatggaagtgaaatttgtgtttgagtcacacctgaaaggtcttttttagctttttcagcagcatctttcaaacgttgaagagccattttatcttggctaaggtctacgccattttcgttcttgaagtcagcaactaaccaatcaataattttttggtcgaagtcgtcaccaccaagtttgttatcacctgctgttgcaagtacgtcaaagacaccgtcaccaagttcaagaatagaaacgtcaaatgtaccaccaccaaggtcgaatactaagattttttcatctttatcagttttatcaagaccatatgcaagagcggctgcagttggttcgttaacgatacgttctacttcaagaccagcgattttaccagcatcttttgttgcttgacgttgagcatcgttgaagtatgcaggaactgtgataacagcttttgttactttttcaccaaggtaatcttcagcataacctttaaggtattgaagaatcattgctgaaatttcttgtggagtgtattctttaccatttgcagatactttttcagaagtacccattttagatttgatagaaataactgtatctggattagttactgcttgacgtttagcagcgtcaccaacgatgatttcaccgtttttgaatgaaacaactgaaggagttgtacggttaccttctgggtttgcaataatttttgattcagttccttcaagaactgcaacggctgagtttgttgtacctaagtcaataccaataattttagacatattttatccctctttttatgatttatctttttttctttcagttatagttttatgacattgcggtcaagtctttgctaacgattagctgtaaacaacaaccatagctggacgcaatagacgttcgtgaagtttgtaacccttttgaagcacttgagcaatgctatctgcaggatgttcttcatcagctggaagagtttgaactgccatatgtaagttgtggtcaaagttttcaacaaccacttcttcaacaccttcttcgttaagcgcacgaatcaagctgtcacgtgtcatttcaagaccttttttcacatcatctgtcaatccttcaacagcaagtgctctttccaaattatccaaacttggtaaaattgctttggctaaatcttgtgaacggtatttttgcaattgctgacgttcttcattagcgcgacgttgaatgttttgcatttcagcatgagcacgaaggtatttattttcaaaatcttccgcacgctcaagtgctttttgcaattcttcattttgagcatcttcttgaggctgctcttctactttttcttcagtcacaacatcagtggcttcaacttcttcttgaagttcttcgtttttagtttcttctgacactgtgtccctcccttatcttttttatcaatttaattactaaacttagttgacctcgtaatgattactattgaggtaacgataataatcaccaagtttcatcgccaaaacacgcccgataacatttaccaagctaacacttctgcgataatccatatcaatcggaccaatcaagctaagaagcccaaatccacgataaggaatcagaaacttatgtgtcaaaacagtcacattagctagcgctgcttcttgactatctgcaacctgaacagtcgcaatctcatcttctttcattgaagagcgaagagcaaccgcgaccctttggtcattatctaagaaacgatatgtttccagattagcataatcaagcgaattaaccttaccagctacaaaaaccaattctttaaacaattctgcgaaaatatagtcgaacaaatctaacacattgtctgtcacggtaaaatatttttgcaaaatctgcggaatctctgttcgtaacttataatgaatatccatcaccgttcgtccaagcaaacgctcatcgacgatttctttcaaagttatcaaatctttcaacataaagtttttaggaatggcaaattgaattgtcgcaggtttggattcatccaaggttaaaacagctagagcatcatgactcgataattgaacaatatcgaaagctgtaagtttttgacgagctggctcaacatccaaaatcactgacgtgtaaccagtcatatcagccaaaacctgacttgctttttgtagaatatcatcaagcttaaaagcttcaaaatcaaaagctttgatgacctgataaatatcacgttcatcgatactgtcaagactcaatgaatgctcaacaaaatacttaaaaccagcagcacttggcattcgcccacttgacgtatgagccttttcaagtaagcccaacttttctagcttcgccatatcgttacgaatcgttgcactactcgagtcaatggttgcctgtaaagtcttagagccgacaggttcatgcgtctgtgtaaataattcgacaatcaaattcaaaatatcactttgacgttgggtaatcataacctcgctcctttctacatttagcactcatatacctcgactgctaattcatgattttattatactcctttaaaaacgagtgtcaagagaaaagctcaaaaaattagcactctttttagtagagtgctaattttctatttatcatacgctgttaagttgtttttttcaataatagcaatcaatttcgtagcatagtcagggtctgtactgaatcccatatcctgcaacgattgtgctggttttttataacccgtattagacactaaaatatcatacgctccatcacttaatttgccagattgtaataaatcaaaataatcataaatagcagccgtccaagatttataaaccgcaaagcgacctgtctcagtctgccactcattaacaaaataactcttataagttaattctatcgccgcttgaccatcctgtgcctgcaccgcaaataaattatgatattttactgccaataaattcgtcccataatttgattccaaaacagcttgggcaatgataatcgaaggacgtacgccatatgacgctgctactttttgaatcgtcggagcaatttcttcaataaactctgtttgcgtataagaaacactctgcttcttcgtagcacttggcgttgcatggtgcaagcaaagcaaaagaattccaacaaaaaagataaaaacaaaagtcaaaaattgtttcagagaaaagcgagatttcatcgattattctccttcaacaaagccacatattcttctaaggttaagttgttttctgtcatgtatttagcagattcaacaccaacatagcggaaatgccaatcttcgtaattgactcccgttgaatcactcttaccttcaggaaaacgtaggacaaaaccatattcaggagcaatagctgcgacttgcgcaacaacattagcatcactctcattcaaagaatttaccgtactcatatcaatagcaagtccagtctgatgttcactagcaccagcaggctgtgaatacgtcttaaccaaatcctccgccgcttcttgcgttaaacttggatcagctgccatttcttgtgacacataggaattaaataattcttcttgataagccacacttcggtagccagaaatcaaatgttcactgctatcaatagcttgcgctgctgccaaaaagtttcgaacattatcagcaatacgtgaatccacatagatattatcaatttgcgttaaatcaggattcatttcagccgtaatattatcacgattaactaaaacaagctcccaatcacttgatgaaacatctggcaaatccgtcgctgaagctgttgaactcgttgaagactcagagctcaccaagcttgaactatccgttgatgacttttgagcatttccactcaatgacaatttgtcaccttggacaaaaacaaaaataccgactataaaaattacaataactaacaaccctagaataagagttggtaaactacgcttttttctcattttttctttcttctaatatttgcctaccacgcaaacgataactaacatcgccgatagactctattgtaaattttccattttcaaaactaacaacggaaatactaccattgtccaaccccaaacttcttggcgttgcgtgatcaattaaccacaaaaacgttccaatagtcatcccatgactaacaacaatagcatttccaccacccaaagcctcgattttctcagcaatagcagtaaatccctctaaaatacggctactcaaaacttcccaagtctcagcccaaccagctgtatcgacttgataaatacctgccgccatttcttgataagtcaacttagtcatatccttatcaaatacacgtggcaacacaccattaaagagctcaccatcgtatccgccatctaggctaccaaaacaccattcgcgaatacgtttatcacgagtatatgggatattttcctgttgacattcacgtaaaataatctccattgtctgtaaagtacgtccactatcgctcgaaaacgcctccttaaaaacaattcctgcatctttcaaccctaaaccaagctcttgaatcccacgctcaccatcaacagttaaaggactatcactccaaccttgagcacgaccaatcgtattgaacatcgtttttccatgacgagcaatatacaatcttgttttaaccataacgattcctcccagacttgattcctataaaaaacagaggtgtacgacaacaaaaataatgatttttttacttttttcagctcttttattatatcatatttttcaaaagcttcatcagttgacacgcagctttgataacctgaaatcatttttttaaatttaagcaaaaaaatacctaggatagcaacctttgcttattctaggtaaatatcgaacaaaataattagtttttaaagctatgaacaggggcagggatttgaccaccacgtttgatgaaatcagcagatgaattatgattaacactcattacaggcgctgtaccaagaagaccaccaaattcaatcatatcgtcttctttaccttttggaataatacgaacagctgttgttttttgattaatcacaccaatagctgcttcatcagcaatcatagcagcgattgtttcgtaaggagtatcttcaggaatagcaatcatatccaaaccaacagaacaaatagctgtcattgcttcaagtttttccaagttaagtgagccattttgaacagcagcaatcataccttcatcttcagatacaggaataaaagcaccagacaaaccaccaacttggttacaagccatgataccaccttttttaacctggtcatttaaaagtgcaagcgctgcagttgttccatgagtaccaactgtttcaagccccatttcttcaagaacacgagccacagaatcaccaaccgctggcgtaggcgcaagagaaaggtcaacaataccaaatttaacccctaaacgttcactcgccatttgaccaaccaattgaccaatacgtgtaattttgaaggctgttttcttaaccgtttcagcaacaacgtcaaagctttcaccgcgaactttttcaagggcacgttttacaacaccaggaccagaaacaccgacattgatgacaacatcagcttcaccaacaccatggaaagcacccgccataaatggattatcttcaaccgcatttgcaaacacgactaattttgctgcacccaaatcagacaattcagccgtttccttaataatgcgtcccatatcagcaactgctgtcatattaatccctgattttgtagaaccaatattgacggatgaacaaacttttgaagtttcagcaagcgcacgaggaatagagttgataagaatttcatcacctttttggtaacccttttgaaccaaggcagaaaaaccaccaataaaatcaattccaatttcattcgcagccttatccaaagcatgagccaaaggaaggtaatcagtcgcatcagtcgccgctccaataatagaaattggtgttacagaaacacgtttattaacaattggaatacctaattcagccgcaatttcatctccaacagctaccaaagaaccagctttttcgacaactttcttataaatcttatctgcagccttattaatatctggatcaatacaatcaagaagagaaattcccattgtaatggtacgaacatcaaaattttgttcctcaatcatcgcaatggtttcagtaacttgtttaatatccacgtctttcctccttaaatattgtacatagcatcaaaaatagcttcactttgaatattaattttaacattcaacgtttcaccataagcttcaaattctgaacgtaaataagtaaaatcttgcttttcatcagatgaaacaacagccatcatcgtaaagaaatcatccaaaacggtttgagaaatatcatcaatattcaaacctaattcagcaatttttgctgaaacacctgctacaatacctgtcttatccttaccaacaacagtaataattgctttcatgagaagcctccaaaataatatttgttcaattttaccataattttcagaaaaattccatttaattcggatacaaattcattaaaaagcgaattattcttaccaaatttcaaaaaatattcatgttttaaaattctatttgctatttttctctaaactcgttaaagaagggctcaatttgggttagaaacgccttctttccctcaaagcgctcccctcgcatcaccttcgctagtttttcttttgctcccgctcccaatcgctgctcaaccgcctgcagccgctcctgataagccacataatccgccagatccagaaagcttgcttgcgccaaacaatgccccacgtcactaatctcctcatatggcagctgattaaacttgcgtttcaaactctcttgatggcgaatcacatccttgagatagttggaaaacttcgttttaaaataagcataaagggacaagtcgtcctgcaacaaatctggcttttcttgcaggagacggaacagaaccacccgtccctcttgtaaccaatcatcatagtcccataatttgacaaaatagtgacgacgcaacttaagcacaatcggtttgaccttttcaaaatagctttcaaaggtttccatcattttcaaatctccttgacagttagtttcccttacttaaaaggtaatcccattataaaaaggaaagcgcaaaaagaccatgacatttttgtcatggtcacaaaagtgcttatgaagtaagaaaaaaacaacagcctcagctattgtcaccgtcttctttactccgccagtaggactcgaacctacgacatcatgattaacagtcatgcgctactaccaactgagctatggcggataaaagctaagcgactaccatatctaacagggggcaacccccaactacttcaggcgttctagggcttaactgctgtgttcggcatgggaacaggtgtatctcctaggctatcatcacttaactctgattgattatccaatcaaaattgaatacctatatattctaacaagtttccgacgcgctgtcaattctctcagttactttggataagtcctcgagctattagtattagtccgctacatgtgtcaccacacttccactcctaacctatctacctgatcatctctcagggctcttactgatattaaatcatgggaaatctcatcttgaggtgggcttcacacttagatgctttcagcgtttatcccttccctacatagctacccagcgatgcctttggcaagacaactggtacaccagcggtaagtccactctggtcctctcgtactaggagcagatcctctcaaatttcctacgcccgcgacggatagggaccgaactgtctcacgacgttctgaacccagctcgcgtgccgctttaatgggcgaacagcccaacccttgggaccgactacagccccaggatgcgacgagccgacatcgaggtgccaaacctccccgtcgatgtgaactcttgggggagataagcctgttatccccagggtagcttttatccgttgagcgatggcccttccatgcggaaccaccggatcactaagcccgactttcgtccctgctcgagttgtagctctcgcagtcaagctcccttatacctttacactctgcgaatgatttccaaccattctgagggaacctttgggcgcctccgttaccttttaggaggcgaccgccccagtcaaactgcccgtcagacactgtctccgatagggattacctatctaggttagagtagccataacacaagggtagtatcccaacaacgcctccaccgaaactagcgtcccgatttcgtaggctcctacctatcctgtacatgtggtacagatactcaatatcaaactgcagtaaagctccatggggtctttccgtcctgtcgcgggtaacctgcatcttcacaggtactaaaatttcaccgagtctctcgttgagacagtgcccaaatcattacgcctttcgtgcgggtcggaacttacccgacaaggaatttcgctaccttaggaccgttatagttacggccgccgtttactggggcttcaattcacaccttcgctaacgctaagcgctcctcttaaccttccagcaccgggcaggcgtcaccccctatacatcatcttacgatttagcagagagctgtgtttttgataaacagttgcttgggcctattcactgcggctgactctaagccagcgccccttctcccgaagttacggggccattttgccgagttccttaacgagagttctctcgctcacctgaggctactcgcctcgactacctgtgtcggtttgcggtacgggtagagtataattaacgctagaagcttttcttggcagtgtgacatcactaacttcgctacttaacttcgctccccatcacagctcaatgttatagatataagcatttgactcatatcacacctcactgcttagacgtgctcttccaatcgcacgctttagttagcctactgcgtccctccttcactatatactctagtacaggaatatcaacctgttggccatcggatacacctttcggtctctccttaggtcccgactaacccagggcggacgagccttcccctggaaaccttagtcttacggtggacaggattctcacctgtctttcgctactcataccggcattctcacttctatgcgttccagcgctcctcacggtacaccttcttcacacatagaacgctctcctaccatacctaaaaggtatccacagcttcggtaatatgttttagccccggtacattttcggcgcagggtcactcgactagtgagctattacgcactctttgaatgaatagctgcttctaagctaacatcctagttgtctgtgcaaccccacatccttttccacttaacatatattttgggaccttagctggtggtctgggctgtttccctttcgactacggatcttagcactcgcagtctgactgccgattatatctcattggcattcggagtttatctgatattggtaatccgggatggacccctcaatcaaacagtgctctacctccaagagacttaacatcgacgctagccctaaagctatttcggagagaaccagctatctccaagttcgtttggaatttctccgctacccacaagtcatccaagcacttttcaacgtgccctggttcgggcctccagtgagttttacctcaccttcaccctgctcatgggtaggtcacatggtttcgggtctacgacatgatactaagccgccctattaagactcggtttccctacggctccgtctcttcaacttaacctcgcatcatatcgtaactcgccggttcattctacaaaaggcacgctctcacccattaacgggctcgaacttgttgtaggcacacggtttcaggttctatttcactcccctcccggggtgcttttcacctttccctcacggtactggttcactatcggtcactagagagtatttagggttgggagatggtcctcccagattccgacgagatttctcgtgtctcgccgtactcaggatactgctagggtttaagactatttcgattacgaggctgttactctctttggcttaccttcccaggtaattcttctataatcttgcgtcccacaacgcagtcctacaaccccgatgtgtaaacacatcggtttgccctcttgccagttcgctcgccgctactaaggcaatcgcgtttgctttctcttcctgcagctacttagatgtttcagttcactgcgtcttcctcttcattaccttaacagtaatgagtgacatgcatcacatgccgggttcccccattcggacatctctggatcaatgtttacttacaactccccaaagcatttcgtcgttagtcacgtccttcatcggcttctagtgccaaggcatccaccgtgcgcccttattaacttaaccttattttggtcttctgaccttaaactcattaaatcacagcgtttcggtttatttcttgttactttctacaattatttctaattgcggaatttgatatagatattcaattttcaatggacaatcaccttgaatctttcgattcaatggagcctagcgggatcgaaccgctgacctcctgcgtgcaaagcaggcgctctcccagctgagctaaggccccacaagacctctcaaaactaaacaagacttcccaaacgtgcttccgttttttccttagaaaggaggtgatccagccgcaccttccgatacggctaccttgttacgacttcaccccaatcatctatcccaccttaggcggctggctcctaaaaggttacctcaccgacttcgggtgttacaaactctcgtggtgtgacgggcggtgtgtacaaggcccgggaacgtattcaccgcggcgtgctgatccgcgattactagcgattccgacttcatgtaggcgagttgcagcctacaatccgaactgagattggctttaagagatttgcttgccgtcaccgacttgcgactcgttgtaccaaccattgtagcacgtgtgtagcccaggtcataaggggcatgatgatttgacgtcatccccaccttcctccggtttattaccggcagtctcgctagagtgcccaactcaatgatggcaactaacaataggggttgcgctcgttgcgggacttaacccaacatctcacgacacgagctgacgacaaccatgcaccacctgtcaccgatgttccgaagaaactttctatctctagaaatagcatcgggatgtcaagacctggtaaggttcttcgcgttgcttcgaattaaaccacatgctccaccgcttgtgcgggcccccgtcaattcctttgagtttcaaccttgcggtcgtactccccaggcggagtgcttaatgcgttagctgcggcactaagccccggaaagggcctaacacctagcactcatcgtttacggcgtggactaccagggtatctaatcctgtttgctccccacgctttcgagcctcagcgtcagttacagaccagagagccgctttcgccaccggtgttcctccatatatctacgcatttcaccgctacacatggaattccactctccccttctgcactcaagtttaacagtttccaaagcgaacaatggttaagccactgcctttaacttcagacttattaaaccgcctgcgctcgctttacgcccaataaatccggacaacgctcgggacctacgtattaccgcggctgctggcacgtagttagccgtccctttctggtaagttaccgtcactgtgtgaactttccactctcacacacgttcttctcttacaacagagctttacgatccgaaaaccttcttcactcacgcggcgttgctcggtcagggttgcccccattgccgaagattccctactgctgcctcccgtaggagtctgggccgtgtctcagtcccagtgtggccgatcaccctctcaggtcggctatgtatcgtcgccttggtaggccgttaccccaccaactagctaatacaacgcaggtccatctactagtgatgcatttgcatctttcaagcatctaacatgtgttaaacactgttatgcggtattagctatcgtttccaatagttatcccccgctagtaggcaggttacctacgcgttactcacccgttcgcaactccttctactctagcaagctaaagtagtcagcgttctacttgcatgtattaggcacgccgccagcgttcgtcctgagccaggatcaaactctcatttaatcttgttctcattctgtcactgacagatttattttcttaacaggtcgatttctcaacccgcacgtttggttcgtcttgttcagttttcaaaggtctttgcctcttgcgagacaacttctatattctatcaaatctgaaacagcttgtcaaccactttttcaagtttttttcaactccgtttcaaaccgattgccgccgcagccctctcggacaacagctatattagtgtatcatctcaagcttactttgtcaagaacttttttagcttttctgtaaacctaagacctgccctcttgcgacagctcatctagtatactaaacttaggaaaaactgtcaactactttttgcattttttactgcagtagtattaactccaagtggtattttcaacccttaacggcagttatatcttcttatgtttaatttttccctatcataaagtttattatgcactacagaggagttatattgccgatttttaacaaatgcgacagctcttcagcttttggaaacaaaaaagacacccaagaaataattcttgaatgtccataaacgttgatatgatcgtattgattaacgttttgagaattgtgaagctttacgggctttcttaagacctggttttgggtagcaaaagtaaaatatcaataaaagcttattaaatcaagctttcaaaagtaagttttattaaatttaaacacttatagcctaatcctacaaacaatggattaccattagattaccaaaaatttgttttcggagcttatgtagttgagaaatggataagcaagtcgtcatagaatgatttgtttttttattccctgactcgagttattttagatactaatcactgctcaatatttatctttaattccctaaaatttaccggctcaaatgactttatatgcaaaataccttctagctgtaatggtaattgcttagagaccaacctgcctataaaaggttgatttggcgtgatcgaacgctgcagaattccaatttgcattttaaaaaatgctttctctctaccatcacttaatttcttatatgtttccccttgcatactccgatatatcgtttctgttaagggacgaacttcatatgagtcaattggatttttgcaaacaaaaccaaaagatgcatcactttccacaaaatgtgtagtaaaaattttaaaatcaacctcataagttgatatatatttaatagaaacttgtaaattctctatatcaggtaagggtgtatatatcgaactgccacttatcacacttcgcatttgttcaatagtattatctaatccttgaccaaataaatcaatatagtatacatctgttaaaatagctggtatcttgcaatcagaaacctttattgggacaaatttaactccctcatagagcgacttagttagagccgcttgccattcttttttgaccatattgctattcaagctatttgatgatagaaaataaaaaaatgttgtaactttttcaagtccttcatccattttgcctataatactatctcctggttgcatagaccatttatcatagaaaatattatctcgtccaaactcaatctctaatcgtttagcaatcatatctactacatcttgatctccgtgattataactaataaaaatcatctcttcctcttcccctttctcatctagatacttttaacctaaattaaaattatccaacatattgaataatttggtgtcctagcaacacttgtattctactgtattctactgtattctactgtattctactgtattctactgtattctactgtattctactgtattctactgtattctactgtattctactgtattctactgtattcttattactaatagtaacccgactgcaatcatttatcaactaaaagataatattgattgcggtcatttttacttgatccaaaccaagtgatgatttctaaatcacgaagatgatgcaacattttaacaacaaacgagcgacttcttcccgtcagctcaatagcttttgcggtggtcatcttctcaccagaattgtacatatagtgaaccagcaattgttcatcagcattgaggtctccaaaatcagtaaactgtttctccaaactatctcgggtccgtaggtgtcggctgacaatattattttcaagcgtcagaacaaccttgttcccaggttcagagtattttggttcatgaagaaaggctgattccatctctgagtaaatccgtttaacaccttcattcatctcacggacccatccaaactccgtcagggttctggcaatccgaggatttcttgaaaaccgttcatgcttaatattgtcaacggtgacgatatttggcaatttacctgggctatgaatctccagtcggtcatcaaacatgagcacacgaatatggtcgccatagacagagtaatcacggtgagtaacagcattgacaacaccttcaaaccaggcaaattctggatactcgggcaaaatttgaaattgcccattgtcatccagatattgaaattcacgcagctgggtacgaataaaatcacgagccttgataatcaggcttggcagagcatcatcaaaggttacttctttgatgacattaaagctagttcctgttcccatgtccgtgccatcaaaccgttggaaacgaacacgagcttgtgggaagaaggctgacgggtatttaccaaaaagcaagatagccgccttggtcaattttccattgaccagaaaacgccgagctttgaggacttcttctatcgaacggtctgaaatgtcaaatcgattcttaaaatcctgaacaagctcattatcgatgtcttccaaggtcgcgtcagccacaacttcatcctcaaagaaacgctgccctttatcatagctgagttgagttcgttgttcataactgagtttaaccgtctcatccccctgacgcagataaacctcatcattaggcgcagcaatcactcggtttgaagataattcaactgagataaccaaaatcacatcgtcttcacccttatggtttcgcacagggatttcttcaaaagataagtccaaaggagtgtcacgcatctcacggtcaatctttttgaagtcatcaatgggataggctctgccatctttgaatccagtgataatgttattctgcttgtcgtcctcgataccaataaccaactgaccaccgtccgcattagcaaaagcaatcaggtgtttgagaagttcagatggctttttgcgtgcagatttcctgtctaaatgttggctttctggtgagaattggtagtgggataaggtttgattcatgtcattctcctaaaaaatgattaatactattataccatttaggaagactgtccagtaagataaacttatcaaaatacccaccgctccgcacttgcagtcttatcaactagactaggtgtttcattgtagtggactcgattacttttacctactttaatgtacaagtctttcaacaaattaatgcttgtcagaacagcttcaccggtatttaatttcttaatctgaccaatttgattttcagataaatgattttgtatcgctttaagttcatcaggagaagtgagtctatgaatcaacatcgtccctacttgacccaaaagtactttatcaacatcgtttggattctgagttgtcaagaagagaaatattcctttctttctaccttcacgagcaatactgtttaacccagtatagaatgtgaatccttcattattgaccccttttgtatatctatgaacctcatcaataaacataacaaacggttttatcgctttagagttcacattaaccaaatagtttgaaataaggtcaacaatcattccaccaataccatcagttgtccctatctcagaaacatctatatataatgacttatcagttgctccttctgaaaacgatttgataatatcgattaaactatctccacttgaagagaaaaaattatcaagcgaagtattatctaacttataattaactttttgaataagatactggttaacattgaaattaaaagtatccgctacaaaattccctctagtatcctgtttagttgtttcagctgctatctgtgttgataaaaatttaatattaaaatttttatcctcctcagagagagttgatagttcttgctctacatcaattactgaccttccaaccttcttgtatacaccatcaacattactcttatactgatatcgcaaagagcgtattgcttccgctaaaacagctggctgagtcccatcatttgtctcaaataaaattgaccactgattcattgatatttgagatagcggaaggaacgcagtctcacccagtatatatttatcaacttcttcaccagtaaacgattcagagtactctcctgttgggtctattatcaaagttcttataccatcacttatcagtttatccaaaatactaagagcagaggtggatttgccactattcgtagttccaacagtcattaagtgcctattaaacaatgtctttggctgtaattttataggatactcctgtgaactaaaagctaaatttgcaaacgatgataattgcttttcactatcagggttaacctctatcgatttgacaaaaagttccactaccttttcattagcgatatatactttatcagtaataccaactgtacttgtcccattcaatttaaaatacttttcacctaaagggatataaccaagaatatcaatacttatttctggaaagattttctcttgtaatccgttcgtcaacatttcgtgaacactgtctgaatttaggactttagtctgaaatatttctccaaaaaataaaccattacttgaatcaattaaaacatagtagttgatcgtattgggagcaaggacatccgtccttaattttctatatgaaaatagtgaaagattttctatttgaaccgtagagtaagagcggtttacttgagaaatcattccaagataatagttactcttatcagctacttcataaaaactgtcgattttagtcatttaaataccttccgctcaagtaatcaactaagtcactattcatagtagcctttaaaaatgaaataggatagccttcgtccatcaaacgtacaagctcagcccaatttttgttatatccggaatcccactcttcaattccagtatattgttttttatcctcattccacactctattcggatcaatattatagtctgtaactaataacttaagacttgagttattcttcagagcttgcgtaaccattttagaaatatgatcatcagcaaaactaaatccagatgaaatcaacaaggtattaggacgctttattaattcttgaaattttgtaaacagctcaaaatatggttcttggtaactttgtgcaaacttgtctgaactaggaaaaaccattaccatattattggtgtccgtaatactatctttagattttctaataatactgccattttcttgcctttcccaagttagagaaccgtggattttaacaagattgaatgtcttgtctttatattctacttctctggtattgacattcggaacctcctttacaagattccactcaaacatattgctgtcaaatttaggcaatggagtgaaattaaagccatcaaaaatcacaaaattattttccgcagcagcttcctcaattaaaacatcataatttgttgtaataacggaaaatttattcccatcttttcctgataggctagataaaaagttcaataacgctccatgtttcaagtctttgctatcatatgaataatttgtattttccttgatgagttccaatattttttgaatagaatgattgaatgtttctttctcgttttctgatacatacggtcggtaatgaaaaagggtcgataggaagtcttccaaattgaaactactattaagtaatggactgtcttcggattcaatttgttcctctactaatatttttccattattgtatttgcatttttctgctagttcttctagtgtataaagatcctccatatcatgtagttttccaaatatatcatcggctatcatttttactgttttaccgtaattaggattgccaccaaccaccgaagcacccgcacctgcaaggaaaacaatatttgaatacttctctccataaatagttttacgaattttttcgctaatcaaacgtttaaaatcaatctcttgaaattcattttgaaaaccatcttttgactcttgtttttcgagtttcccattggaatcaaaaaactccttgtcattaattttatctacaccgtatgagatagcattcgataaataatgcaattcaatctcttgatcgttagtctcattctcaccttcaaagaagaagaaaaacatataactcactcctccacttcaaatttaggcagactgttaattaaatctactgtctgcattgatacattgataattctaagcaaaagattaaagatatacttttcatctgtgctgtagtcattggggtcatctgtgataccagattttttatccgttttcacttggtattggtccataatccactcaatggcagaacgtccattaaccatataattatatgctttttcggggatatttctaatcgtaatatcgttattatagacaatagcagagcggtcaccttttttgatgaatttcatcttggtcaccttataagaagggtgacccgataactgaatgtcaacatcatcatagacaggaacttcctcatagttaaggtgcaagtccatcaaggctttgccgacctcaacatacttgtctttctgcttaacaatcggaatccgagccaagtctttcttcaagtcattggcatatttttcctggtactcactagaattaagtagaccataaacataagcaaaggtatcatctaaacttaacccaagtttgtcagcaaaagcctgattcatattatcattagactgaaaaagtgctgtttcatcgatttcattatcataacgcatgaaaccttgacctttttccataaagtcattacttggcatataattgattactaaagtagagaaatctcgtgatgcacctcgacctgttgtatttatgacaagattatcttgaccgaatttattgtaataaagacgagcttcttcattgagtgctttatcatgatatacccacttcttagtaaacggcctataaagactgagttttaaatgactctgctgatactctattgataaattattaactacaaatctttcaagtttacgtgaccagttaatataatccgatttcctatttaacaaatcttttctctcatcacttggaatatttttcaatcgttccaactcactattataattttgaattagtctctctgtatttttagcaactttttcccttgagtaaccatatacccacgcatcacgacttgtcaaaattcccatagaattattcaaaaagactgcattatcttcacccgaaagaacattatacttctgataattcggatctctctgattgagccaatcattattatcgtcaggctcaatactctgccactcaatagctgaaatatccgcaaacctctcaatgatagtcagtttttccttttgcgacaggtaatcaccaatatcatgataatggatatcatgctggtctgaaccatctttaactagaatcgagattgcaactgttgttcttgtgcctccgccaaagacatttcccccttcttttttacgaagttccccaagtccaagggcattcccacgcatattgaaaatataaaggtgattaaaatcctcataaagccctgcacgtaaaccatctgtggaatttgaatttagaaaaccaccattagttacaaagccaataacaccattgtccctgagacggtcagacgcccagcgaaaggctttaacataagagtcatatagacctttagttaatcctgcattagacttagtgacataagtctctgccaaacgttggtctagtttaggatatgagatgttttggttattatcattctgactaccttgaccaatagaatatggcggatttccaataatggctgtaatcggcttttcttgctgacgtttgagacgttggtcattggtcccgaagaaggaatcatcaagggtatcttgagtttcagtggattcaaaggtatctgtcaatacaataccttcaaacggcagatagtgttcctcgccgttaatatcatcaaagaccgcttcaatattgatagctgcgatatagtagctgagcaagacaatttcattagcatgaagttcttgcgtgtactttctcaccaagtcagcgtagctaatttctcctttgtccataagtgacttgagatagtgaagggtacgagtgataaaggtgcccgtacctgtaaatgggtcgaggatatggacattttcactggcaatagtcttaccaaaatgtttcctcaagacaacatccactgacttaacgataaaatctacaacttcaacaggagtaaagactataccaaggcgctctgtcgtagacttgaaactagtggagaagaatttgtcatagagtgtaatgatgattttctgcttggcttgggcattatcaatcccttccgcacgcagacgaacagagttatagaagggttcaagttccttttgttccttctcaaacccatattgagacagttctgctacgatttgttccatagcagagctgacaggattattttttataaaaccgtattcgccaaaaagagcatcaaagattggtaaagtaatcaagtgctgagccaacatctcaatagcttgattttggtcaatcgattcattgatattatgttgcaagctatgcaggaagcgttcaaaagcttgtttgctttcgggatttgattccaatataatgttaattccttgaatatgacggcgagcaatatcagcaacatctttagaccagtcttcaagatagcgtctatctccaactttttggacaatttttccatatattgcgccttcaacagcttcccactcaagctctaactccgtttgataaggaacaaaaggttctgcaacgtcattacctgtataaaaatctggatcatctggagcagagccaacaccaataatttgaatattttttggttttttcttattcagctctagtttattgatagtcgcctcaaaccgctcatcaactgaacgtagggcattcaatacctgccaaaccacatcataagacttgttattatctaaaatcgtttcgggggtttcaccagaaggaatgacaattgggagaatgatgtagccgtaatctttaccttcaaacttgcgaataattcgcccaaccgcttggacaatatcaacttgcgatttacgaggagaaaggaagatgatggcgtccaagtttggtacatcaatcccttcagtcaagaagcggacattagatagaattcgagccgattcttcaggtatatcatcacttgctaaccaatccaatgcctcattcttctctaaggcattcatgttaccatccacatgtcgaacattaacagaatagccatcctctgagttaaggtaatcattaacgacattttcaaattgggctgaaagacgtttgctatctgcaatcgttcttgaaaatgcaatggcccgtttcatcggctcaccagataccttatctgtaaaactctcacgttttaccattgcattccaaacaccgatgatacgaccgacatcatcaatattcagtccattttcagggtctgacagagatttctgcatatctttttgaacaacagtttcatcaactgccaaaaccatgagtttgtaatcagtcagaatatcatgactaatggcatcaccaaagcccaagcgatagaacacctcaccgtagagactctcatcgtccatacttgagatgacaatcgaattatcctctgcttttttcttagcatccgcgccataaagtttcggtgttgccgtttgataaagacgtttcatgcctttaacatttacatcgctatgaactttggtaaatacagatgcctcttcaccaaaagattttgcaccagttgttcgatgagcctcatctgcaataatcaaatcaaaatctgggaaaccattcttctgagctttccctagaacatcaatggattgataagttccaaaaacaacaagaagttcttttttaggttgtttcatcaactcctcatagttctccacgacttttttggaagaagttgtagcaggaaaaccaatatcactagctttaatctgaatatttgactcatcattttttacacttgcccgacttgcatttctatcgctggtaacggccattgatgaaatagataattcagcgtcattattccaccctcttaaagtttgagttagcaactgaatacttggcacgagataaaggacaacatactggtctttcttagcttcactagccatagcttccgcgatttttaagctagtaaatgtcttccccgtaccaggtgccatgatgagttgaccacggtcatgatttttaaaatattcaagtgcagcattaataacctctcgctgataatagcgaggggatttcttggcttttacactgacttgttcagggcgttcaaatgaaaactgtgtccaatcaatctgggaatttctaaggtcagataggccaattctcacaacatcatgtctatctgcaagtgcttgctcagcatttctcccccatttatcagttgaggcaacaataatacctgattcataataattttttccaagttcccctaagaaggaatcaatatcagatttctggattccttgagtataaaattttgcttgaatagcaacaaggctaccagtaatagtctcagcaaccaaatctacaccaagatcagttttagggataccgtattcagcaggaacatctgataacatccacacatttctgaattcatttttataagttggctcatgctgtaaatacgcacgtactagatattcaaaataagttcccctatctcgctgtgtatctgctgattcattaatctgtctaactagtgtatcaaaagtcatcttgtttccctttcccctctaaagagtaagggactagtaggattagtgtattactatgtaatacactaagggtacccttagtgtattactatgtaatacactaagggtacccttagctctaattttcattcccattatatcacgttctttattttaaatctttacctattcaattttctcaagggactggggactctccccagatatataactaaacatcaggaaaattatctgttagacctttcctgatgtttagtttttacgatagtgtgtatacactgtctgagctcgcaaagacctaaaattatgtttttgtatcaattctaaattccccgtgccagacacggtggctgacattgtcagacaatcattttttagaaggacataaaaaaaccgcagataaattcctgcggtttcatttacttatttaatgtttagtagacttctttttcaggttaactgagagtcccttttccaattcatccaataattgagttatcaactgaccaagttctataaaattctgttgtgaaatatttccaacctgagttgacaacttggcaatcctattaattgatctgccaatctgaatgaatcgctctgtcagttgctcatactctggaaaattaatcgtccatgattcaatctcttggttaaataatttctttctggcaaaagcggaaaagtttgactctttttcattagccattaatgctaacaatcttttattctcatcctcagtcaaaaagacttgcttcacgatatttttaattctatttttcattcatccacttttgatagtaacctcgcctttttcgttttatggtatttaaggaacgatttttcatatttttcaatcatttgaacactgtaagtcatagctcgtaatgcttgaagatcctgagattgctctgctatccttgctaactgattgatattatttttaattcgcctcaaagaaaatatcaagtcttcaaatgaagtttcatcaaataccacaacaatagggaatttcttaaataacattttcctagcatagttagaaaaattccttaaacctgtataactgataaggtagtttagcgtttgattctgcgattttgtgatatagaattttttcagaactgttcgataacgctcaaccacgataaattctccttgtgtatttttctgcctgagacacatcgtattccctcaaatattctacaagttcctgataatcttgcaacagcccttcttctaaatttgggaagtcattttctctgctctggataataatttctagttgattgacaatttctctaattgagaaactataatccagggtttcttcctcatactctgcttttaacccttgataccgttgtaactcttcttctgatttaaaaccagcgactagcatattctccaattgataataaattgtcattctactctccttatcccttttggtaaaactttctagcattttcatgagcaattaccttagcttccaataatcgctcatcttttaggcgctccatagagctcattaaataggctaatggtgactctacatcattaggaatacgatctatcattcccaagacttcatcagaagtcatatagccttcgcttaaaaactgtccaatcgccattttttgcttatgcgttagggtgtaattataggggtaaataaaacgatcgttatatctatccgcaatcacttgcaaaagggaataatactctggtttgagataagttgttgactgatcttctgtctctctagaactattatctagtatattcttattctctttctgattcttgttcttaatctgttgcgttacttgactgttactttccgttacaggtaacgtttctgtaacgttacattctattgataaactatcttgcccacttactagagctttttgcttttgacgatgacgagccactctttctcttgtttgtttacgaattttttctagaccatcaatattctgatgtttctcccatttaggaattgtgactgctccatccacaaaagcaatcattccaaattgttcaaatgttttcagagccagcttcacagtcgttgactttctcctaaagactgtagttaacatctcttctgtataaaagaccttatctcctagagctaagactccactgtaattctgtttacctgctaaaacgagtagtttaaaccagatgacaattaaagtatctccttcgggcattgactcaatcaactgtattttttcatcatcaaagatatctgtagtaatcttaatccattgtacttcactcatacgtgtacctcctatctttcatattgctttagccatctagtgacagctcgtttatcgtacagagtcaccccatcaatgaccattgtaggcattccttctcgtgtccatttttgaagggttgtcgttgatacatcaagccacctagaaagagcggccatccggaccataggtttgtatagttctttatcttctagcgctctttcaatagctgtagagaccatttcatcataatgtgcccttaactgtttttccaaaactttgggaagttgaacaactaaagtcgcttcttcagacatattattacctcgtttccatttctcaattaaataaactccgaattttgtatattttattatacattttaaattataaatactttttgtattcttgtcaagtggtattatactttttgtattaaatgtggtagaatatcaattaggaggaatctatgactaataatatagctaaacttatagaagaaagtggcaaaaaaataaaaagtatcagtgaagcgctagatatatcctacccaacactatctagctataaccaaggaatacgaaaacctaaaaaagagaatgctcaaaagttagcggattattttggtgtctcagtggcatacatccttggaattgacgaagaaaagtacgctccgtcaaatttaaaaatcgtcactgatagtttcaagacatctgaaattacttctgtaacaccttttaaaagcgatatggagaagcttaagaaaggaatcgaactaggagagattcatttgtctatgcccttaaatgaaggcttctcagacgattttaggcgcattttagcgcgctacttgatcaatcatgaggaagaattcatgaaaactttcactaaacacatgaatagtttaaaacgagagtcagaaatttggcaaacctggattcagactgaagaataccgaattagacaagaagatcgacataaaaaataaactaacagtttctcaattacataagctccgaaaacttagaaacggagaactgttatgtctgtacacaagtaccaatctacaaaaggaatcacctattttgttaaagtttaccttggtttaaacgactacggtaagaaaaaatattatactaaacgagggttcaagacgcgtaaagctgccaaagctcatgaaactgctgttaatcatcagttgaatagtggaacttttgtccatattactgctcaaacaacctacacttaccaaaagctttatcaaaggtggtatgaagcttataaagatactgttgaagcaactactgcagtcaaaactgccgacctctatcgcctacatattcttcctgtttttggagaaaagaaaatttcaaaaatcagtcctttagactgtcaaaccttcatcactgacaaagccaagacattcaaaaacatgaagcaaatcaaatcttatacttctaaaatatttgaatttgccattaatatgaattatattgaacgaaatcccatgagcaaggttattatgcctaaactcaaaaaaactgtcagtgagaactattggacagttaacgagttgcatcattttttgacaatcattttagaaaatgaaccttataaacattatgcactatttcgattactagcatacagtgggttacgaaaaggagagctctacgcccttaaatgggaagattttgattctgagaatcaactattaacagttagcaaaagtttaggaagaatagatggtcatgccattgaaaaaggaactaaaaatacattctctgtacgctctatatatcttgatgatgaaacctgttctatcctcaacaaatggaaacaggaaactagcagagaaaagtggcaattatcagtacaacctctttctctcgacaaagaatttatgtttacatactgcaaccgaaatggtgagatagaacccttacacgctgactatatcaacaatattctaaaacgtattatacgtaagcataatcttaaaaagattagcccacatgggtttagacacactcacgcaaccttgatgattgaaatgggaattgacccagtcaatactgctaaacgcttaggccatgcaagcagccagatgactttagacacttatagccatgctacaaaagctggtgaaaaacagtcaattacaaaatttgcagagtatcttaataaggctaaatgaactagatttattgctcagcctcatattgaccaaaaaccaagtctcgaaagattaccaaaaggattaccaaagcacttttttcatcaaaaaagcaccttgcgaaaacttcgcaaagtgctctgaaacgttgatataactgaatattaacgttttgagaattgtgatgccttgcgggcttttttgagacctggttttttacgttcaaccatacgagcgtcacgtgtaagaagaccagcgcgtttcaatgaatcacggaaatctggatctacttgaagcaatgcgcgagcgataccgtgacggatagctcctgattgacctgcgtaaccaccacctacaacgttaacgaaaacgtcgtatgaaccttcagttgatgtaactgcaaatggttggttaataacaagacgaaggtcagcatgtgggatgtattcttctacatcttttttgttaactgtaattttaccagtacctggaactaaacgtacgcgtgcaacagcgtttttacgacgaccagtacctgtgtattgtgcttgtgccatttaatagatgctcctttctctcttagataagtcctttaatatcaagtacttctggttgttgtgcagcatgtgtatgctcgctacctacgaagactttcaatttcatgccttgtgcacgtccaagagtgttgtgtggaagcatgcctttaactgatttttcaatcaagcgaacagcatttttagaacgaagttcaccagctgaaatttgtttcaaaccacctggatacattgagtgagtgtagtagattttatcagttgcttttttaccagttaatttaactttttcagcattgataacgataacgaaatcacctgtatcagtatgtggtgtaaatgttggtttgttttttccgcgaagtacgctagcaactactgcagaaagacgtccaagaggtacatctgttgcgtcaacaacgtaccatttacgttcaacttggcctggtttagccatgaatgttgttttgttcatgagttctcctatacgaattcgtttttgtttacaaagtgtggatgttccggtccacgagttatttgaaaggttccggggccttacaaatggggtaaacaataccgtttattataataccaaaaaaagtggtaccaagtcaacacttacctaccatcttttctaagttttttagcgattttttcttctttttcatagaaaacgcttagcggaatttacgggtattttctgctaagtgaactaagtggcgtaaaaaatcatgcgttttggcttggtaatcataagtcctgcctaaatcatagatataaccattgatataatcaacttctgtctgacgtcctttgttcatatcttggtacattgacggataatgcagaggacttgtttccgcgctaacataccgaatggtctcccattcttcatcacgactattcagaggagtaatgcccgctaattcggcaacgttataagcttcatcaattaattgacgtcctaatttttcggcaccttcgtaatcaatgaattgtcccatacgaatttcaaaaagggtgcaaatggtattgatgacagaattgaacacaacttttgtgtaaagtgttcctaaaaaattatcagtcaggtttggattgaggtttgaggcttcaaattcagttattacctgcttttgaacatcatcgaccgttcctgattgagcggcaatattaatagaaccagcacctgcttttccaataaaatcaacatttcctgcgtctttcaagaccgttccaatcagacaagttcctgctaaaactttttcaggcgcaaaatagcgattgattttctcgatatgtcccatgccgttcattcctgtgaaaacatattgatttttgtggaagaaatgcttacttcgttcgagcaactgtgacaaatgcatttgcttatcaaaaatgataaaaacatctggttttccttggtattcttctggtgtctgaatgctaattggaatcagatgacgatttttaccatcacgtgattgataaacaccaccttgttttctaaccgtgtcgatttgctcttcccacgtatcaataaaatccacttgagcaccgaggtgttcttttaatagcagcccaaaacgtagtcccattgcaccacttccaagtacagcataagtcaaagccatgtcttttcctcctttgattttaaaaattatatcacttcatcagtcgaatatggaggaaatcaggtatagaattttcttatggctagctataaataaaacaataaaagatttcatgtgctttttcaaacaagtcactaactattaactttaatattgtaatccaaactaacaactttttctgtataagcatcggctgtaatgcgaatacaatagtctccacttttaaaatagagcttttgtgaatcttttaagtcatcaccatctatttgataatagtgatgatgattattatctacgatagttaaatgaaggttgccattatccgtcgtcgcattaaccttgacctctaatttaccagcttttggaactgtaaaataccctttagccactgtcagagaggtttgtgccatatcattacttctataagttttatcatctttcatggaaaaattaactgattggctattgtgtttattccaaataccaacagctattacacaaatgaggacaaaaattggtagagcaatcaaccataagcgagatttcgtcttggatttgttgctagtcgtcaaatgcatttcatttttgactaagtcatcaactgagattccaaagtgttgactaattttaatgagcatttcaacatcgggataactttttccattttcccaactagaaaccgtttgtctagatacatggaataaattagcaaattcatcttgactaagattattcttttttcttaattcattgatattcattataaaactctcctttcgctactgacgtaacgagtacattatctcctttttcgctttgaaacactatccaatatccttgacatattagctaaggcgcctttacatcgtgtcaaattcacttgacagtcccattttacaataaaagagcagcattttactactctttttactttaactttatcttgcttcttttccgattgaaaagacggctaatgttcctggtcctacgtgggcagaaatgactggtcctagtggcatgatgaggacatggtcaacatcttcatgttctagtaatgattttttgagtgtttcagcaccttcaatgtcattggcataggcaacaacggctgtgtcatgtgctaatgattgtgttgcttgggaaacgacttctttcaaggcttttttgcgtccacgaactttggctaatggaactaattttccagatggttcaatccacaaaagtggcttgatatttgctaaacttcccataatagctgacgtttttgataaacgtcctccacgcataagatgataaaggtcatcaaccaagaaataggttcttagacgtggcaaaatatcaataatcattgctttggtttcttcaagagtttttccttcatcacgcgcttgcgctgctaaaatagacaagtaaccttcaccgccagcagcagccaaagtatcaacaatttctatagtagcttgtgggaattcttccaaaacgatatcacgcgcaatcatcgagctttgatacgttcctgaaagaacagatgaaaatgccaaataaagcactttgtccccattttgagcatgatgtcggaagctttcttcaaattgtcccacattaacttgactagtggttggtttgccaccatttttcatactttcaagcaatacttcactcgttaaacggttctcaccgacagtttcgtatgtttttccgtctaattgaatggttaatcctaaaatttcaacatcgtgagcgtttgcccattcttcatctaaatcagctgttgaatctgttattaatttaaaagtcataattcttcctttactatcaaacactgatttttctgacattttaccgtcaaatcagttttcattttcaaaataatactttgataatcaaatgattttaaattattataccaaaaaagctcacattgcgcgagcttcttttttaaaagtctgtttctgattaaactacatatcgtctagcaattgcttcaatttatccaattgtccgtcgttccaagggcgtaattttggtgttgttaaatcaatatgttgagacattttatccaaatctgatttgaccgtattaacacgttgttcgagctcacgagccgagacgcgtaaagctccctgcgagaaaactgtccactgctcattcaaatcactggtcgcaacttcaacaagattacgaggtgtgtttaattcagcagcggtacgttcaatgtaagaatctgcagtctcgtcttcttctgtaaagatgacttgaattttatattggtcatagcgttgacgaactccaggaacatattgcgcatcaaaaacacagatgatgtcaagattttcaaaatgagcgtagttatttaacttacgtagcaagatatttctggcttcgtctagttgatttttcttaaacagttgacgtgtttcctgccaaaaggcaatcatattataaccatcaactaagaggatttttttcttcaattgttctagtcctttcatagatggctagcttttttcggctttacaaggttttagtcgattttatggcggaaaacttcgtacattaatactgccgcagcgacgctggcatttaagctttgcacatgaccgttcatcggaatggtaatcatttcatcaacttgttttttgatgttttgtgaaatgccctttccttcgtttccgatgattaatgctaatttacctgaagtattccatttgtgagatggggttccattcatgtctgttccaaatacccagaagccctgttcttttaatttatcaagggtttggctgagattggtcacacgcgcaatcggcacatgctcaacggcacctgttgatgttttggcaacaactggcgtaacaccaaccgcacggtgttttggaatgataacacctgtcacgtttgttgcatcagctgttcgcaagattgagccaaaattatgtgggtcattgagtccgtccaagataagaatgagcggattttcttcctgcgcagctttatccaaaatcgtgtccaattctgcataggcgaattctgaaacacgcaaaacaaatccttggtgaacagcaccatttgtcatatcgctaagtgtttttttaggcgtccaagagatggatacttttttctctgctgctaagttttttatcttatcaacattttttccgcgtaaatcgtcttgaatgtaaagtttatttcctgtattagccgtcaaactttccgttacggcatgaacaccgtaaacaatgtcattagtttcattaaattctctgtttttcatagtgttattatatcacgaaaaccagctctcatgcgagaactggctgttatttttattttggttaattatttatcttttaaagcctcaaaaagtgcttcaatttgtttttgcaatgcttcgatcgaatcgtctgtaatttgtaattggttatcttcccaagcctcaatatttacaggaactcctgtaaatggttttactacatgtgttctcaaccaacctaacagtgtcgttaattgttcaaaaacatcttctggagaacggccattagcaactgatgaaacagttaccaatttatcttgtaatgcagacggaccacgtaaatcagataaatctaatgaacgacttaaccaatccagtgcattttttaagactcctggaatatcatgattatacgctggtgaaaatatccaaatggcatctgctgattttacttcttcacgaatagctttaatttctggtagttcaggcgtttctaaatcttgattcatccaaggaagatcaattgataggtaggaaatttctgtattatctggtaatagtgtttctacttttttagctaattgttcattaaatgatcccttacgtaaagatccaacaataaatacgattttagacatattaaactcctttttatctttaataagaaggagtttaacatattcatcagcaagctaaaagacaaaaaaacttaaatgtcgagtaaaatagtctccaatccttgagtcataatttgatttatcatatcgacaacaacttctactgaacaatcttgctgattttctagccaccactttatcgttgccaatgtattagaagcaaaaatttttgaaaaataatcaattctatacggtgaaacacgtggatatttttgagaaaatatttctgtaacgactctttcaatttctttttgcatcactaaatcaggagtataatttttaagcgataatgagaatagaatctctaataaatcttttttgcttggtaatttttcaaaataataaatagcacttgcataatttaagttccctgtttggagtgactcttttagagattgacaatattggtaaatatattcgtcgcaaatagttttaacaagttcctctttggattgataaaataaataaaaagtcgttcggttaatttgtgcttgatttgtcaaatctgtaattcgaatttcatcatacgatttttcaagtaggcattttaccattgtatctctgattttacggtctgtaaattccgataaagaatcatttttcattatctttcccccaatcactaaaatcaaagagaataagcctcgattaaccactggttaccgagacttattttttcattctattttctcaacggcttgaatacaccagtcgattagttcttcgaggcgttcgatttggtcagtcatatgaagatatcccatgactgcttcaaagcctgttgacatgcgataagtcacgacatccgcatttttagctttggtatggctatttgtgttgcgaccacgtttatagatgtcttcttctttttcggtcaatagctgagcttctaacataagattaattagcatagcttgcgccttagcagagacatatttggttgctttgcggtgcaattgatttggctttgttaatccttgaaaaatcaagtgcttacgaatatacatggaataaaccgcgtcaccttcaaaagcaagggcaataccattaattagattgacatctaccttgttagtcacgtgtccacctcacaccatctttggtatcaagaagcttaataccttgtgctgctaattggtcacgaatggcatctgctgttgcgaaatctttattggcacgcgcagcttgacgtttttcaataagtgcttcaatatcagcatccaagacttcttcttcaaacacaataccaaatacagcaagcatcttagcaaagatatctttgactgcttgattataattacctgaattaatccattttgccatgtcaaaaatgactgtaataccatttgccgtattgaaatcatcatccatagctgcttcaaaatcagctttaaattttgccaattcagcaacatcggcttcttcagtaagtggcaatgtaaaagtatttttcaaatatttaagattaacagaggcgtcatgaacagctttttcagtgaaattcactggcttgcggtattgttgtgtcgcaaggaaaaatcttaaaacttgtccatcaacgttttttaacatgtcatgaacagttacaaaatttccaagagattttgacattttttcattatccacattgacaaaaccattatgcatccaataattagcaaatgtttttcctgttttggcttcagattgggcgatttcgttggtatggtgaggaaattccaagtcggctccaccaccgtgaatatcaatcgtatcaccaagaatggttgtcgccataacagaacattcaatatgccaaccagggcgtccttctccccacgggctttgccatgaaacctcgcctggtttggctgatttccaaagggcaaagtctaagggattttccttgatttctccttcgccatcaacacgaccactagctccaacttctaagtcagcaagtgttttattagcgagttttgcatagttttggctttttgcaacgcgaaaatacacatcgccattagcttcgtaagcaaaacctttatctaccaagactttcacaaagtcaataatttcatccatataatcaatgacacgaggatttttagttgctggtttcacaccgagttgtttgacatcctccatgaaagcggcgataaatttatctgaaaaagctttggtgtccataccagcttcagcagctcctttgatgattttgtcatcaacatctgtgaagttagaaatatagttaaccttgtagcctcggtattcaaaataacgacgaatggtgtcaaatgccacaacgctacgagcatttccaatatgaatatagttgtaaaccgttggtccgcagacatacatattaaccgtattttcagtaataggcacgaaatctcgcaaacttctggtcattgtatcataaattttaattgtcatgtctgtttctccccttttatagtcattcttaaactattgtttaaactgttcatgttgtctaaagttttgaggaatgcaagctttgatagcgtgcttcttcaagtttagacgtgtaatattcacgattttcttccatgttatgaatagcatccacatctttcttaccgtgaacacgaacaacttttgcaggaacaccgacaactgtgacatcagcaggaacatccgcaactacaacagcagcagcacctaccttagcattttttccaatttcaataggaccaatgacttgagcgtgagcagagacaagcgctccttcacgaacggtcggatgacgttttcctacatctttacctgttccaccaagggttacaccgtggtagagcataactcccttttccacaatagctgtttctccgataacaagccctgaaccgtggtcaataaaaactccttcagcaatttcagctcctgggtgaatttcaatttgtgtccaaaaacgccaaaattggctgtgcatacgagcaattaatttaaaaccatgtttccacaaaaaatgcgataaacgatgtgcagctagtgctttaataccgggatacgttaagataatttccagagagctacgagccgctggatcatttttcttaacgatatctatggtttctttccaccaacccatatcttctcctttcctttattcgtcttcgtcaatttcagaccaatccactaagatttgttggtcgtcaaatggattaatcgcaactcctacggtttcgtcaatgtcattttcgccatgtcctggttggtaaatatctgccaagcgccacgttaaaacacttccttgtgctttacggaatggcaaaccaaaatcgttgtggttataccatttagcaaaactttgaaggtttgagaaagcaggcacgtagcttttgccttctggtgttgacattgttggaaacatgcgatcaaaactcttgtcatcacgtgggtgaacaaaagcaggtactaaataatatttatccaaaacatctgcggcgagattttcttctcccatgagtttgtttaggatagttgtataagcattcaaaaattgaatcaattcactgcttttaaaaatggttgaattgccaaaatcacctgtctttttaaggttaaaaacaagtcctgtcaatcctttttcaataacttctctcaaaacatctagtgttgaacgttccacccaattttgttgtagggcgctagcttgttctgttttaaatgtttcaaggtcatctttgtctgaaaaaacaggtgtcaccttttgcccatcaatttcaagagcataaggctggtcactggctaagacggggttgttatgcaaggcgttgacaagagcaacactatctaaaaaattgtctggtgcgttaataaaggcacgcaaacggatatcaagttcatttgtatttgtcatgataaaactccaaaattataaagaatgactttaagaaagatgattagtcgattttgtcatgtttttctttacgatcacgtaagtgtccgccaaatggtgaatgtcctttgtgttctttctcagctcttggtggacgtggtaacaaagccttcattgaagcatcaacgcgacctttatcatcaactttaatgactttaacatcaacttcttcaccgacttctaaaacatcagaaacattagccgtacgtgaccatgaaatttctgaaatgtgaacaagggcatctgtcttatcaaagagattaacaaacgcaccgaatttttcgatacgaacaactttggcatggtaaacttcaccaactttagcctcgcgaactaaaccagcaatgatttcttttgtgcggtcaattgcagcttggtcagatgaataaatagatacatttccttcatcgtcaatatcgattttaacaccagtttcttcgataattttatcaatcgtttcgccacctttaccgatgacaactttgattttatcaacgtcaatcttgattgtatcaatttttggtgctgtcggagccaattgagcacgtggtgctgggatagttgcttcaatcaaatcaaggatttcaaaacgagctttcttagcttgagcaagagcttctttcaagatttgaggggtgattccttcaatcttaatatccatttgaagcgctgtaatcccttcacgtgtaccagcaactttaaagtccatatcaccaaagtgatcctcaagaccttggatgtctgtcaagattgtgtagttgctaccgtctgaaatcaatcccatggcaatacctgctactggagctttgattggtacaccaccagccataagagcaagagtacccgcacagattgaagcttgtgaagatgaaccatttgattccaaaacttcggctacaagacggattgcatatggaaattcttctaagctaggaagaacttgcgcaagagcacgttcaccaagggcaccatgaccgatttcacggcgacctggagcgccataacgtcctgtttcaccaactgaatattgtgggaaattgtagtgatgtaagaaacgtttcttgtattctgggtcaagaccgtcaacaatttgtgtttctcccattggagcaagggtcaagactgataatgcttgtgtttgtccacgtgtgaaaagacctgaaccgtgaacttttggtaaataatcaatttcagcatccaatggacgaatttcatcaacacgacgaccgtcaggacgaattttgtcttcggtaatcaagcgacggacttctgcgtgttccatttgctcaaggatttcagcaacgtcacgcatgatagtttcgtaattttcatcgtcagcgtagcgttcttcgtaaacagcaatgacttgttctttcacagcttctgtcgctgcttcacgcgcttttttctcttcaacttgaactgctttttgaaggtcagcgttataagctgcgatgatttcagcttgcaattctgggtcaacttgaagcaattcaacctcagctttttctttaccaacagctgcgacgatttcttcttggaaagcaatcaattcacgaacagcttcgtgccctttaagaagcgcttcaagcatgatgtcttctgacaattctttggcaccagactcaaccatattaatggcatcttttgtaccagcaacagtcaactcaagaagtgaggcttctttttgtgcagctgacggattgataataaattcaccgtcaatgtaagctacttgaacccctgcaataggtccgttaaatggaatatctgagatagataaagcaagtgagctaccaaacatagccgccattggcgcactagcatcttcatcgtaagagagaacggtattaatcacttgaacttcattacggaacccttctgcaaacattggacgaatcggacggtcaatcaaacgcgctgtcaaagtcgcatcagtcgttgggcgtccttcacgtttattgaaaccaccagggaattttccagctgcatacattttttcttcatagttaacttgaagtgggaaaaagtcacctgttgacatctttttagacatgacagctgcactaagaatggttgattcaccataacgtaccacagcagcgccattggcttgtttagcaacttgaccaatctcaacaacaagtggtctgccagcaaaagttgtttcaaaagtttgttttgacatatttattcctctgatattttattttgatacgtccgttttctacaaaaaccagtctgtaaaaaacttataaactcgtctttgcataaaaccacgtatctctatcattttatcacattttatgggaaatagcagagcttgtagcatagttttttaagaatactaaaaagcagttgtcagttgacaactacttcttatcaaaatatttacttgccaaagaataaatcaacgactgcaataacaataatagctcctaaaatcgatggtaaaattgccatgccagctaacgatggtccccagaagccaaataaactttgaccaacaaaagaaccaactaaaccagcaaaaatattgtaaatgcagcccatagattctcctctattggtaattgcaccagccatcatcccaataagcgctccgacaattaatgaccaaatcataatattctccttttaaatcgttgtcccactagaaatgtttgaaagagccccactaattatccacaaaacgattagataaaataccaaaaccaaaatagctacgacaaataaagctattcgactccgtttgctaaatcgatttgggcaagtgaatcccattccaaaagaacctagtatcatcagtattaaaaaaacaattgtttgttctgccatgaaaataaaggaacttaaaaatacaattccgaatgctagtgacaaaagccacatatatttccaacggtgaccaattgacaaactcaaaccaagaaaaatcaaccctagcggtcccattaaaacaaaacaaaatgctaaaattccaaatatcatatccttattgtaacataaaagcctcccaaagggaggcttttaaggtattgactgctaactaaacaactaatattagaacatatcaatcaaaagttgtttcaattctgaaatgtatggttgacgtgggtttgctggagtacattggtcatcatatgccaagcttgccaaacgatcaactgctgcatcaaaggcttcttttgtaacaccattagcagaaagttttggttcaacgtcaacagcatgcatcaatttatcaatgcggtcgcaaagtgcttcgactaattcagcatcatctttacctttaagaccaatataacgcgcaatatctgcgtaatctttttgagcacggtattcttcataacgtgggtaaactgagcgtttaacattaccagatacaccgttatagcggataacatgttgcattgcaattgaaatagctaaaccgtgtggaagtccaaattcaccacctgttttgtgagcaagtgaatggttgatacctaagaaagcattaccaaatgccataccagcaatagctgctgcataatgcatgttttctttagctttttcaccacgaagtgttggattcttaggatcgtagttataagcatcttcaagattttcaataatcaacttgatagcttcaagagaccatggacgtgtaaagtcagatgccataactgatacgtaagattcaagagcatgtgacaaagcatctaatcctgaccaagctgctgtacgttttggcacagtcataacaaattctggatcaacaatagcaacttgtggtaccaattcataatcagcaagtgggtatttcacgtgtgtataatcatcagtaataaccgcaaatggtgtcacctcagcacctgtaccagatgtggttgggatacagaagagacgtgttgttgtttgatgtttgaatttcacaatacgtttacgaatatcaatgaatttttgttgcaattcaaggaaaaattcgctaacagcatcataactatcaaggaattcatcaccacggtcaagataaacttcataaattaaacgtgcaatcttagatgcatcaatagcagagccaccaccaattgcaatgactgtatctggtttgaaatcacgcatttgttttgcaatttcgattgtttgtccaagagttgggtctggtttgattgttccgtaaattgatgttgcgactttttcatcacgcaatgccaattgagcaaggacagtgtcaacaaatccaaattgaaccatacctgggtctgctacaatcaaagcacgttgcattggttcatattcatcttgcaaatatgagatagcattcttttcgtagtaagttttttctggtaagcgaatccattgtggacggttacgacgtttcgcaacagtcttgatatttaagagatcgccagttgaaagattgtgtgacaatgaatttttcccccatgatcctgttccaagtgttaagctggctttaagtgcgtctgtatagacatcaccgatacctccgactgaatctggttggttaaccaagacacgtgatgctttcacggcatcgccatatgttgctacaaatgggtctgcttgtgaaccaatttggataccggcattgtgtcctgcaccttgataatcaagaagcgcttcaacaatttcgataccttcttcacgatctttagctttgtacactgaaaggagtggagacaatttttctgatgatagtttttcaccgatgtttttcttgtcaagctcaaacaagagaacatctttaccttctggcaatttcacaccagcttgttcacaaatccaagttgctggcattccggcaacaggaccgtttacaccatggttgtcattgaaaacaaagtcttcaattttcttgtagtccttcttaggtactaagtaagcacctttatcttgcattttttgcaaccattctttgtaaactggcgcttcaacgactgctgaattttcagtcgcacaaatcataccattatcaaagcgttttgataacaacaagtcttccacagcgcggtcaatatgagcagttgcatcaacatagatagcaccattacctgcaccaacacccattgatgggttacctgatttaagggctgcatttaccataccaggtccaccagttgccaaaatagaagcaattttcttgttttggataagagctgttgtgttagcaattgatggcgtttcaatccattggacaatattttcaggagcaccagctttcaccgcagcgtcgtaaagaatttttgctgcatgagctgaacatttttgtgcttgtgggtggaatgcaaaaacaatggcattacgtgttttcaacgctaccaaaattttaaacattgttgttgatgttgggtttgttgttgggacaatacctgctaaaacaccaagaggtgctgcaatttgaatacttccagaaaccttatcttcaccaatgataccaactgttttttcatttttgatacgttcgtaaacgtattctgttgcgaagtggtttttagtatctttatcctcaacgacaccacgaccagtttcggcatgtgcttcttttgccaattctagcgaagcttcagaacctgcgagagccatagctgctacaattttatcaacttgttcttgtgaataagttgcataaacgcgctcagcttcaagagctttatccacaagagcccctgtgtactgctgggctgcttcttcagcgctcaactcgttattctttacatctgcatttgttgctttagccattaagaaaacctccttataagtacccttaaaataagtgcctcaatttttaagaagaacaatgaatgaatgacaccaagataaaaacaaagcctgtatagtcgtctaaaacctcaacagaggtcaaaaaactctcttcactacacaaaatcaaaggttaagttcttcaactatcaatcattgtgatattcttcaccaactatattaaacttttttcaaaaaaagtcaagtattttttgtaagctttttcatttttattacaaaagcgttgtaaggggatacaaaagaaacgccgtaaaccctgctatattaatgtttttatcacttttgacacgattctctcattttatttaatcatctcaaggttattatcgtttgctttcattttttgtaaaatttgtctttttaaaggagaaatcattttggaaaatacaaaaaagccccttggaaaaatccaagaagcttttagttgacttgggcgtctgattaacgacgaagtccgagtgatgcgatcaattcgcggtaacggttaacgtctgtgcggcgaaggtatgccaacaagttacgacggtgaccgatttttttcatcaatccacggtaagttgcgtggtcttttttgtgttgtttaatgtgctcgttaaggtggttgatttcccaagtaagaacagctacttgaacttcaactgaacctgtgtcaccttcgtgacgtgcgtattgagcaatgatttcattttttttctcttttgagattgccataataattttctcctttatattgcttcatccgagtcgtaggtttttggcgtctcctacaaccaagaaaaagttacttgtcatacgacagtccttattgtagcagattattgctgcttttgtcaaaggtttttaatgtttttagctaaggtcatctaaaagttatttggaaatcatctgtttgaaaaacttttttcaaaaatttatcaagaaagtcagaaaaaatgacaagaatattctaaacagcgctcagctattttcatcttttccaaaatcaactatactgaaatcaaacaacaagaaagtgagaactcttatgacaaaatctttaattatcatggatattgacggaacattgacaaacagcgagaaaaaaatcactcctaaaacaaaagaagctcttttagctgctcaagaacaaggagcacgtctcatcttggcttctggtcgtcctgtaagtggtatgcaggattttgctaaagaattagcaatggacaagcaccacgggcttttagtggcttataatggcgctgtggtagtggattgtgaatctggcgatattcttttcaatcaagccatgacggttgaagaaggacaagcagttcttgaacacgtgaaacaatttgatgtcatcccaatgattagcaaaggggattatatgtacgtcaacgatgtctataacaacatgattcactgggagaaaaagaatctagacattaatatcattgaatacgaatcacgtggcggtaaatatttactagctgaaaagcgtgatttggctacctttgctgatttcccgctcaataaaattttattggctggcagtagcgattatcttgctatacatcacaaagaaattgctgcaccatttgaaggcaaactcagttcaatgtttacggcagatttttattatgaatttactgctcaaggaatcgacaaggcaaaagccttggatactgttttagcaccgcttggttatcaaccagaggatatgattgcttttggtgacggacaaaacgatgctagtatgctgacttattctggaactgcggtggcaatggcaaatgctgtgcaagaattgaaagacattgccgatattattaccctttctaacgacgaggacggtatcgctgaaacgttacgagattactttaacatttgattaaacgggagataaaaatgataaaaattgaacacatcggtgtttgggtacgtgatttagaaacgatgaaagagttttttgctaaatactttcaaacaacggcttctgaacgttatcacaatccacgaacaggtttttcttcctactttttaagcttccctgacaatgctgctcgattggaattgtgtcatcgcgaggacatttctgaaggcgttgatgagagtcttggctttgctcatttagccatttcacttggtagtaaagaagccgttgatcagttaacggcacagcttgaaaacgatggctatcatgttttaggtcaaccccgaacaactggtgacggttactacgaatccgtcgtttgtgaccccgaaggaaatcgtttagaattgaccgtttaataggctttgctatgggtagattacctatccagcatttgcgaatctcacttatagcaaacaaaaaagaacttgggctaaatcctaatcagataggtattaggagtagttaccaagtttttttattcttttttcgttttggtcattcgctcgtaagcttccaatttgaatgccaaattttggtcgtaatttaattggaaatacaaagagtacaaactatctaacaaataaagtaaggtcattcgtgtcgaaaatgacgacatcttattgtagtgattttcagaagaagccatgtaaataatatcgtcagcataagctgtcaagggatttccttgtgttgatgtcaggagaataataggtacctgatttttcttcaatatcttgcaaaaggcctccattgaagagccgcgaccaccaaacgaaatcacgaaagccaagtgactactatcgctgtttgtcgctgtcaaactcttgatatagtcgtcttttggtaccgtcaccagctgattaatctcctgcatttgaaattgaaaattttccgcaaaatacagattcgctgatgaagtataaatgtcgatgatgtttgcttttgacattttttcaacggcagaaaccaacgtttctgggtctgctaaccccaaggtatcctcgattgttcgctcataaacctcttttaaccgcaacatcacttcatagtgcgtatccgtttctaaaattggaaaatcaatatctgagacttgatgattttgaccttgttggagatctgttcgcaaaagtaatttcaagtcattgaccccacgcaatcccagcttattaatcaagcggtaaatggtcgaaacagaaataaaaagtttatctgagacttctcttggctttaaggcaataaattcttctggattttcttttaagtaatctactaaaatctgttctgttggtgttaggtgttctagtaattgtaacctttgtatcattttcataggtttattgtatcatttttggcttaaaaagcgtgttttaaacatcaagacaaggctgattattaggctaataatagcataaatcacaaaggcaaaaccaggttgtggattgatttttgaaaaaagatttaggacaatggctgcgctagctccgccaaaattacaaaatagcagaaccaaagttgtcgcatgtccaatcaattgtggcgatattttatttgacacattgctaaagacgcttgtaaccacaatgctgtaccagaaccccgaaagcattgctccgataagcattaaccagagattgtgtgccacaccaagcataaacaacccaagagcaaatggaagcaaggaaacaattatcaactgtttcttaaatcgtgctaataagccttcaaagcaaataccagagagaattcccattaacatcatgccgctcaaaatcaaactagcttggcgtggacttccaaggtgcagttggtcaacgataactggaattctaaggctattggcactgttaatattaatcacaaatcctgccaataaagacaatccgacaatatacacaatatctttttttgtaaatttagctgatgttttttggctagccacttccgctacaacagctcgttttggagcaaacagcaaataaaacagtaaaataggtaaggcaaacagataaacgataaacgcccatgaccaaccaaacggcactaaaaaacctaccagagctgttaaaaaagcattgcctagcacttcaaacgacccacgaaagccaagcatttgtgcgcgctcatttccttggtaattttcgctaatgatactaatcgcacgcgcgttaatcagaccaattcccattcctagaagcacacgtgagacaacaaccagcgcatacgttttgccaacaacgggcaaacttccaccaaatgcaatgaatgacagtcctaaaatgatactgctgcgttctgacagaaaacggtccaagaatggatttatcaccaacattcccataattgcaaaagaggaaatggaaaacagcatttcaacctgacttgcagtatagcctcgttgctgaaacgttgaaatcatttgcggtaaagctgttgacgttgaaaaggtcgaaaccaacatgagagacagtgacaagagactaagtttctccaaaagtgctttcatacgaactccttacttgtttttttcatcaaatcaagtataatcaaagttaacgcataaaaatatgacttttgtcacaattaaaaggagatatacgtgtcattagaagcctatattaaagaatatcagctagaaaaaatcttccctactcattattttgataaattgcaagtcttgcaactatctgctggagatgccatttgtcatcaaggcgaatcattaacagcactctcttactttgccaagggaaaacttaaaattgttcgccgactttttaacggaaaagagcacattcttgacattaaagaaaagccaaccttaatcggtgatattgagttattaacagaccagcctgtcgtatcatctgttatcgccctcgaggatactctcattatccaactccccttagctggtattcgtgaacaattgcttgctgacaatgctctgcttttaaacttgagcaaaggcttagcacaatctctctacgagcaaaacattcgcgcgtcaacgaatttaaattacacattgaaagaacgcttagcaacgcatatcttggctatcgaggaaaaaggtgttttcaaattagaattgacaagccttgctgattcatttagcgtcagctaccgtcatttactgcgtgtcattcatgaactgattgatacaggaatcatcgaaaaacgcagaccctattattacatcaaagacatgacgcaattgattgacctaaaaatcactaattaagcctttaactttctcgttccgcatttttgtgctatattgttattatagaataaattgaggagaaaatatgtcagttattgaaaaattagcaaaaccaagtcatttaatcaatatggatgacatcattcgtgaaggcaatccgacacttcgtgcggttgccgaagaagtaacgtttcccttgtctgatgaagaaattattctaggcgaaaaaatgttacaattcttgaaaaactcacaagaccctgtgacagctgaaaaaatgggcttgcgtggtggtgttggtctagcagctccacaattagacatttcaaaacgcatcattgctgttctcgttccaaatcctgaggacaaagacggtaatccaccaaaagaagcttatagcttacaagaagttatgtacaatccaaaagttgtggcacattctgtccaagatgctgcgcttgctgacggtgagggatgcttgtctgttgaccgtgttgtcgaaggctatgtggttcgtcactcgcgtgtaaccgttgattactttgataaaaatggtgaaaaacatcgcattaaactcaaaggttataattcaatcgtcgttcaacacgaaattgaccacaccaacggtatcatgttctacgatcgaattgatgagaaaaatccatttgccattaaagaaggtatgctaattatcgaataaaacaaaaagctcattgtctttcgcagaaattgacaatgagcttttttgtggctaaggcgagcttaaataccattttagcaaaaccattcgtaataaaaaaacatcttcatttaaaagtatatatttattttcaaatatgagatttttggggaaataaatttcatatttgagaatatcgtaagtcacgcctttattgtgatatagttagttcattagtattagcaataaataatactattcaaacagagaaagctcgtaaggagaaaagtttatggtgaaattagaacgacataatcaaatgttactcttgtcctttgctttgacggcaatgagttggttgtcacttaacctgattagcttactaagccacgtgggtaaccatggtattatctctagcgctgtcaccataatcggtgctatcgctggcattgctgggtttatctctggaatcgtagcaattgtgttgttccttgttgggcaaaaaaacaacactactctccattaattaataatttgatatagaatatagttgttaatatcatcaatttgatattaagatgtatccccaatataaaaaagctcattgtcaaccattacggctggcaatgagctttttgtgtatgatttgatttagtcaattgctgatagaaggacttgagcttgtttatcaagatttgcaagaacttcttctgttggaacgaacacaccatccgcccaagctgaatcatttacacgtgtcgttgtgatttcatcgacaaattgtgtacggatgaatgggagcaaggcacgatagctttctgccgcttgttcgtgaccaccattagcaagaatagaaaccgtagttactttttcgttgattgctgatggacctgttgggtctgaaaggtcaatggcacgtgacaaccagtctagcaagtttttcacagaacctgggatagcaaagttgtaaacaggtgagaaaatccagatagcatcagcttctgaaacagcttgacgagctgcctgaacagccgctggaatattagcttctaaatcttgtgaaaagactggtacttgtgaccaatcaagatagctaacttctgcttttccttcaagcactttttcagcatttttagcgaattgagcattgaatgaaccgcttcgtaatgaaccgacaacaaatagaatttttttcatgtaagtctccttaaaaaggttatttatttagtaatgattagttttaaagaaatcaaagtatcatttatcactaaatagtgctttttatatgctgtcattgtacgctttatttttgattttgtaaattattttgctcacaaggtttgaattttttcaaaagtcgaatgagttctgcttgttcgtcctctgttagcactgaaaaagtttcctcaactttagcgatatggagtggcagagcgtgttcaatgacctggcgtccttgctctgttaacccaaccagataagctcgtttatcgtgagggcaagtggtacgtgtcacccaaccttttttctccatatttctgatgacaaccgtcatattgccagaagttgccaacatactgtctagtagttctgcgattttcatcggtcctttggcataaagaacgtctaaaacaccaaattgagtcggtgtcaaatggtcaactttaaacgactctgatactctagcatcaatcgtgcgaaaagcttttcgcatcacaaccattgattttacagcattatttttgaaattcgccatttcgtctccttaaaaatttccctttaaaaataaatatcataagaaaacgaacaaaccacgtcagttttctgaaagcaatttgttcgtttctatcctagtttaagtttctatcttagaagaaatcatcaaacagacttaattggttatcttctggcatattgccaaggattcccatttcgtccattttttcaactaatgtggctgaaacgccaccacgtttgcggagttccatttttgagaggaattctccttcttcacgtgctttaacaatttgcttagcaacgttttcaccaagaccgtccatcgctacaaatggtggaataagtgtatcaccgtcgatgataaactcggttgcatcactacggtaaaggtcaagttgaccaaatttataaccacgttcgagcatttcattgacaatttcaagtgtggtgtataaatcaatttcaacatttgaagcttcgttattcttacgcttattagaaatatcagccatgcgttctttcaccgcatcaagcccagcactcattgtcttaatgtcaaaggccttagcacggattgagaaataagcacagtagtagtaaatcggataatgtactttaaagtaagctacacgaagcgccattaaaacgtaggctgccgcatgggctttggggaacatgtacttgattttaccacaggattcaatgtaccagtcgggcacattattttctcgcatagcttcaatgtatccattacgttcctcatcagagattttaagccacattcccttacgcacacgttccataatggtaaaagccatttttggctccaaacctgcgtgcatgaggtaaaccatgatgtcgtcacgacaaccgataacggttttcagcgtggcaatcccctctttaatcaagtcttgagcatttcctagccaaacgtcggtaccatgagaaagccctgataactggagcaattcggcaaatgttgttgggtgagtttcttcaaccataccacgaacaaagtttgtcccaaattctggaataccaagcattcctgtcggcgttccgatttgttcaggggtgacaccaagcacttctgtgcctgagaaaagcgccataacgtctgggtcatcagcaggaatatctttaggatcgataccagataaatcctgcaatttacgaatcatggtcggatcatcatgaccgagaatatcaagtttcaagacgttttcatcgatatcgtggaagttaaagtgagtggtttgccattctgctgataaatcgtccgctgggtattgaacaggggtaaaatcatacacatccatgtagtttggaataacaacgataccacctgggtgttgtccagtcgtacgtttaacaccagctgcaccttgtgccaagcgttccacttctgcttctggatagaatttgccataatcacgttcgtaacctttaacaaatccgtaagcagtacggtctgccaccgtacctacggttccagcacgaaaggcgtattgttcaccaaaaatatcacgaacgtccaagtgagctgacggttggtcatcaccagagaagttcaaatcgatatcgggaaccttgtctccatcaaaaccaaggaaggtttcaaacggaatatcgtgtccatctttcttgtaacgtgtgccacattctgggcaatccttgtcaggcaaatcataaccagaaccaacagaaccatcggtgatgaattctgaatgctgacaatttggacagacataatgtggtggcattgggttaacttcggtaatcccaatcatggttgccacaaaacttgatccaaccgaaccacgcgaaccaaccaagtaaccacggtcgttggaacgaattaccaacatctgcgaagccaagtaaatcacggcaaatccattacccaaaattgacgttaattctttttcaatacgtaaatcgacgatatcaggaagtggattaccatagatttcaaaggctttttgataggtcatttcagcgacacgttcttctgatttttcaaggaaaggtgtgtacaagtctttcttaacaacctcgacttcctcgaaacggtcagcaaaatcattggtattcttaacaacaatttcatacgcgacatcttcgccaagaaaggcaaattcatctaacatttcattggttgtacggaaatgcgcttttggtagcggagcaggttgggcattttcaccgcgaccaatcggacggttaatcggtgccccttgccctaaactacggacaatgatttcacggtaaatctcatcttcaggctcgatataatggacatttccagtcgccaaaacaggcttgttcagacgacgtccaacctcaagcaaatctcggatgacttgtcggataccctcttcatctttgattgttccttgtgccaatagcggagcgtaaagcgctggtggcataacttcgatgaaatcataatatttcgctactttaaccgcagcatccacccctgaagataagaccgcatcaaaaacttcgccctctgagcaggctgttcctagcaagagcccttcacggtgggcgtcaagaaccgttctcggaatacgagccacaccttcaaaatatttgacattagaaaggctgacgagtttgaaaatatttttcaaacctgtttggttttgaacataaatcgtcgcgtgtttgacacgtgctttcttgtaagaatcctcagcaaccaatttcgtattcaaatccatcatattggttaaattgtggttttcacgtgcttctttcaagaaaataaagagcaagcgccccgttgcttccgcatcatagttcgccatatggtggtgttctagcgaaacttggaaccgtttggtcaatggtcccaaaccatgacgtttgtattctggatagagatttcgggcgaattccaaggtatcaatgacaggttgtgtaatgattggcatgccatgacgttcataattggcattcataaagccaacgtcaaaggttgcattgtgggcaactagcacagtatcctgacaaaaatcttggaacatttgaaggacttcttcaatcggtttagcattgcgaacatgattatccgtaataccagtcaattccgttgtaaaagctgataaatgatgacctgggttgatgaactcatcaaactgctcaacaatatttcccttgtacatttttgaagccgcaatctgaatcaagtcattattgaccgcagaaagcccagtcgtttccacgtcaaatacgacgtaggtagcttcgtttaactcaatatcttgaggattgtaggcaatcggcactttgtcctcaacgatattagcttctaaaccaaaaatcgccttgataccatttttacgtgctctgtgataaccgtgtgggaaactttgcacattgccgtggtcagtaatagcaacagccttgtgtccccatttcgctgctgtatcaattaattcttcaaccgttggcaacgcatccatagttgacatattcgtatgagcatggaattccacacgtttttgaccttctggcattaaatccttgcggtcatgatgaacaatctctttgacatcttgcacattcatggtcaatgcatgggtgaaattattattttcaacatttccacgaactcgaagccatgaccctttggcaatcatatcgtattttttcaactcatcatcatcttttgcccatttttgcatggcaaaacttgatgtgtagtcagtcattttaaaattaataatgtgacgtcctgtacgagttgttttcttttcaacgtcaaaaaccattccttcaaagacaattcggttttcttctgttgtgacttcaaccattggtgtgatttcggcattttcaaaacctgcacggcgctgtttggcacgttctttaaaatcaaatttaggttttggtgcttcttcagttggtggcatagaagcttccagagatttaaccgcctcacgattttcttgcaccgctttttccaccatagcttcgcgatttgacgtaaagtcttctcgtaaagcttgcgtcatcgcttcatcagaaaccatgtcaatggtaagtttgccaaaaccaaatgcttcaaattgacgagctagattaggcagatgatttttgcgaaaatggtcattgttaacaaatgctggcgcttcaatcaataattttgtgccatcataagagaccttcaatttactgaaagaagccttgaagctggcgctatcacacggagcatgctcaaaagcttcttcatagtaggcttgcaataaaggttgtgaaaaatcgacagtttctgcctgaatatcaaaagtcgctctgatatccgcttgcttaaaagtgttcaccaatcgataagacaattcacgatagatgtcaattggcaaaatttccgcaaatgaaaaatggaactcccagaggcgagatacagaatgcaccttaacttcacgaatatctgcagatgaaaaagcagaagattgtcgcatgtcaagcggcatatcgatttgctccatcaattttttaaataattctgacataatgcgtaaactacctcaattccaaaaactaaatttatctactaagcaaaatacacctcttggttaccatattttgccttcttttctagttacgttatctcttaattttaccacaaatggaatcttttttcgacacaaaagaaaagatcaggactgactgcctgaccttgttatcattaattttcttttgtcaaaatttcaagagtttcgataaggttttctgcgttaacttcgatagtatcgccagttgctttaattttcacttcaacgataccgtcagcagctttcttacctactgtgacacgaattgggagaccgataaggtcgctgtctgagaatttagagccgacacgttcgttacggtcgtcaaccaagacttcgtaacctttagcaaccaattcagcttcaactttcgctgtcaaagcttgtgcttcttcatctttcacattgacagtgatgacgtgtacatcaaacggtgccaattctttagggaagttgataccccatgcaaagcggtaagcaccttttggtgttttagaaacaaagagacgagcatgttgttcgataacagctgacaagatacggctaacaccgataccatagcatcccataacgattggaatagcacgtccattttggtcaaggattgttgctcccatgctttctgaatagcgagtaccgagtttgaagatgtgtccaatttcgataccacgagcaaatttaagaacacctttaccgtctggtgagatttcaccttctttaacttcacgaatatcaacgtattccgcttcaaaatcacgtcctgggttaacacctgtcaagtgatagccgttttcgtttgcgccaacaactgcattggcaacatcttgcactttgcggtcagcaacgatgcggacattttcaggaaggttaaccggtccaagtgaaccaaagttagcaccaaagacttcaacagcttcttcttcgcttgcaggttcaaggaaatcagctccaagatagtttttcaatttaacatcattgacttggtcatttccgacaagaagagcaactactggttcattatcagcaatgaagaaaagtgttttgattgtttgttcttcgtcaactttcaagaatgcggcaacatcatcaattgatttgcaatctggtgtttccacacgtttgacatcttcttgagcgacaacttttgttgttggtttatattcattgcttgccatttcaaggttagcagcgtagcttgattctgttgagtaagcaatggtatcttcacctgaaaccaaccatgatcccaattcttttttgatatcttctaaaacatcagctggaatttcatcaattgaagcgattgatttatcaagaaccaaccaacggtcaaggtctgtacggtctggagtgatagccataaactcttgagaatctttaccccccatggcaccaccgtcaccaatgatacctttgaaatcaagaccagcacgtgtaaagatagcttcatatgctttacggtaatcttcgtaagttgtgtccaatccttcgtagtcagcgtggaaactataaccatctttcatgataaattcacgtgtacgaagaagtccgttacgaggacgtttttcatcgcgatatttagattggatttggtaaaggttcaatggcaattgtttgtatgattttaccgcatcacggacaagacttgtgaatgtttcttcgtgtgttggaccaagaatgaagtctgatttatcacggtttttaagtttataaaggtcttcaccataagtttcgtaacgacctgattcacgccaaaggtcagcattcaaaagtgctggggcaagcatttcaaccgcaccaattttttcaaattcttcacgcatgattgctttgaatttttcaatcgtacggttagcaagtggcaagtaagcgtaaatacctgctgagacttggcgaacgtaaccagcacgtaccataagggcatgactgataacttgggcatcgcttggcatttcgcgaagcgtagggataagcatttgtgattgtttcataacaaaatataacggtcaaatcatgaaaataagtaagctcttcaatcaaacaagtagctcacttatcttctttttataaaaggccgtataaattcctttctaaaaaataggttttatttataaattattgtactacatcatttaggcataatcagatatatctaaaagaaaactcgcataatatcgttccaagtgacagcaatcatcaaaacaagcatgataacaacgccaactagggtgatataagtttcggtttcttgtttaagcggtttacgacgaacaatttcgataaggttcatcaaaatttttccaccgtccaaggctggaatcggaatcaaattcacaattcctaagttcattgacaatagcgccaataagtaaagaactgaagtcaatccatttgaagcagcttgacttgaagcttggtacatggcaacaggaccacctaatttatccaaactaaagtttgaaatcaagcctttcaaagctgtcagaatagcggtcgcgctttgccaagccatttggaagccaccagtgaccttgtcccagaaacctgttttcaattctggcgaaacaccgatataatagctaccattattttctttcggtgttatatcaagcgtttcagtctttcctgagctggtttcaacggttacagaaatcgtatcaccacttgaaatattttcagttgcttttgtgacagcctccgtcaaatcagaccaattagagatgtcataattttcgatggataagacacggtcaccactttcaacaccagctgcctgcatggcaccaccgtcagttacttgaataacattcgttgacgtatcttgaacaccaccttgcatgaaaacaagaaggataaagacaattattcccaaaataaagttattcaacggaccagcaaagtttgtgattaaacgtccccaaactgttgcattttgatattgtacatctagcggtgcaatacggatttctgtaccatcttcctcgacaatagtcgcatcatggtcaacagaataagttttcgtttcatcaagcaccagacctgtgatttccaacttatcctctaaatcataagctgtgacattcatcggaagagcggtgttgtccaactgcttttgtgataaattaatacgtgtcaccaaaccgtcttgatttagtgtcaaactggcaggtgttccagtcttgatttccgtcgtatcatcaccccaaccagccatgcgtacatagccacccagaggtaggatacgaattgtataagcggtaccctctttatcaatatgtgaaaagattttcgggcccattccgatagaaaattctcgtactaagataccagactttttagcaaagtaaaggtgcccaaattcatggacaataactaaaattccaaaaacgataataaaggttaaaattccgagcattttactcctttccgtaccagtaaatttgatattatcctaataatcattcactagccattaagcgacaagagcgacttgtcagcgttaactcacaatcaaattagaaaagaccaaggagatgcataattggaaagacaaaaatcattgaatcaaagcggtccaaaataccaccatgaccagggattaatttgcctgaatctttcacgccaaagtgacgtttgatagcactctcaaccaaatcaccgaattgaccaaaaacactaaacaacacaacataaataagcattgcaaaaagattatgcggtgtatagactgccttatcaacaagcatgaaaatcaaagccacaataatagcacagacaattcctccaaggctaccttcgattgttttattcggagaaactttcggcaacaatttacggcgtccaaaacgacgtccaatcatgtaagcaccgatgtcagtagcccaaacgataaacaaagcaaataaaactttatctaaaccgctgatacgagcattaacaaggttttgaaaaccgatgccgacgtaaagactagccgcaattggataagaaacgtcgtcaaatgaataatcatcactgtttaaaacagttccagccaagagtagaaaaactagcaagccataaactgaaaaacttgaatccagcggtagcgatgtaaaataattatccaaaggcacagtaagaacaaaagctcccaacatcgccaaaacaccttcaattgagaaaaattctagacgtttcatgcgcaacatttctgccacaccaatcatcgctaaaagaccagcaaaaacttggaaagataagcctcctaacaacagaaacggcagtaaaatcagtaaggcaatcgccccccaaatcacacgttgtttcatgacatttcctttctatattccaccaaaacgacgatgacgtcgattgtattcagcaattgccttaatcagctcatcttttttgaaatcaggccataaaactggtgtgaaataaaattcactataagctgactgccaaggcagaaaattacttagtcgaagctcaccgcttgttcgaataatcaaatcagggtcgcggtataaatacggcaagtgatttgtcatcaagtggtttgaaatcacatcttctgtaatgtcatcaggattgattttagcttcaagcacttcttgggcaatgttttttactgcttctgtgatttctgaacgtccaccataattaagcgcaaaattcaaaatcaaaccagaattgtgctttgttttctcgcaagcacgtttcatcgcatcaaaagtatcttttggcaggcggtctgtttcaccaataacttgaactttgacattatttgcgtccaattcagggacatatttatcaaagaattcgactggtaaattcataatgaatttaacttcatcttcgggacgagaccaattttcagttgaaaaagcatagaccgtcaaaactttaacaccaagttcagaagccgcaatggtgacgtcttgcagagcgtccattcctgctttgtgtcccatgacacgtggttgcatacgcttcttcgcccagcgaccatttccatccatgatgattccgatgtgttttggaatcttttcaaggcttatcgccttttctttttttctaaatttaaacataaaatttccttaaaagcatactcgttataatattttaccataaattggcaattttttctccacttattacacgcttttaagcagattatgctggaaaattctccaaacattgcatttaaaaagccagacgttttttcacatctgacttcatgtattaatctttgctttcaatagcagtatctgtacttgcttcttcagtagcttcttcaacaactgcttctgtttctgttgcttcttcgataacagttgtttcaggttcaacagtttcttgttctgcgcggttaataacacgttttaaagcactcaattcaaatatcaagtaaacaccatcaatgtctaaaaccattttttggttatcttcatctacttcgtcaacaactccgtaaagaccaccgatagttacaatttcatcacctttagctaattctttaagctgattttgacgttcttgagcttgtttcttttgtgaacgttgcatgaaccaaatcataccaaccaacacaaccaacataataattgttcccatatgtttcctccaaatttataaggtcaaaatttactataccaaatttaagttatcaacgcaagaattgaccgttaaaatggtaataaagcaaggattcaacgtgtgaaatctgtcaattttttcgcataaaacacttgagtctgttctttaaagcctaatttttcatatagactcttggcagcaatgttagctgactcaactgcaatctgaaaggttttctcattttcagcaatcaattgattcaccaaccttttcataaaataggtaccaattccttgaccgcggcaatcctcaaccaccgcaaaaccgtaaaaatagttataatccgtactaaaatcaactgtacaagaggacaagactgtatctcctctcatgacaatatacagcttgccattttcatcttccaaagcccctttggcataatgaagcgcttgttctttcgattctttaaaagccttcatttggaaatcagcaatagcttcaatatgtgctgtactagcctcaagaacggttaaatccgtgcgctcttctaaaggatatggttctctctcacgtgtcaaccaatattcaaaatcaggttctaacaccatgcccaaatgcctgattaagtcaggatttttgtctaaaaaacacttctcagtcatgatgattggtcttagttgataatcacgtctaatctcatcaaattcacgccagagcgcctttgcatacccctttcgacgatgatttgggtgaactaaaatagcaagctcggcttcttgacaatcagcataaacggttaataaagccactaattttccctcatcataacccaagaaaaacgatggcatatccgcatcaaaattaagctgattagacaaatacggtgtgcgatgtgtctggtcaaacgcttgaacaaccttgataagttcattagctgccaacaattcctcatctgttaaaacattagtcctaataatttccataatatctccttttataatcaagaacaggacaccaagttgaacttggtgtcctattatatttatctatcattatacccatttgggtggcttgagtgccatgcccatgctgaggcaatgattttttcaatgtcatcaaattgtggtttccaaccaaggacttcacgcgctttgtcagatgacgcaatcaagatatctgggtcaccagggcgacggtcagccagttcagctggaatttctttgccagtcactttacgagctgcttcgagaatttgaagatttgaaaatcctgttgaagaaccaagattgaatgccgttgacggattaccttcacgaaggtatttaaccgcaagcaaatgcgcatctgctaggtcaaatgggtgaacataatcacggacatttgtgccatctggcgtattgtaatcattaccaaaaatcatgattttttcacgtacaccttgtgccacttgcagaataattggtaacaagtgtgtttctggaccgtggtcttcaccgattgaaccgtctggttttgcaccagcaacattaaaatagcgaagcggtacaaatttaataccgtaagcttggtcagaccatttcatgattgtttccatcatgagtttactttcgccatacggattgattgggcgttgtggtgttgtttctttgattggaatttcatctggaatgccataagttgctgctgttgatgagaaaacaatgtatttcacgccaaattcattcatcacttcaagcaatttgaccatgcctgctgtattgttatcaaagtattttaaaggtttttccattgattcagcaaccaatgaataagccgcaaagtgaataacagcatcaatatctggattttctgtaaagactttacgcataaagtcttggtcagcaaggtcgccttgataaaatgtcgcatcagggtgaaccgcagcacggtgccctgtcaccaaactatcaaccacgacgactttctcgtcacctttttcaaccaaacggtcaaccatgtgagaaccgatataaccagccccaccaagcactaaaattgacatgtatttctcctattctaaccccacgctatctacaaaacgcataaaggcagcttgacctttttcatcacgtttgtaaacacctgcgtcttctaaaacacgaacaaaaacttttccgacttcctcttgtacaatattatgcactgatttagccgtaatatccgtacgttttttaattttatctgcccaatctttgtgatagtcagcgatttcattatactggttcaaaagatatttttcaacttctgacagttcatctttcagacgcggaggtaaaatagctaagcccataacctcaatcagaccgatattttcttttttgatgtgttgcacatcagcgtgcggatgataaacaccgtcaggaaattcagcagtcgtgtgattgtcacgaaggacaatgtccaattcaaacaagccacgacatttacgagcaatcggggtcacggtgtggtgcggtgtgtctcctgtataggcgacaacatcaacgctatcatcagaataatcacgccaagccaagcgaatggtttcagctagttcaaccaaacgatttttatcagcgctacgcaaacgaataacagacattggccagttgacaataccagctgtcacatcagaaaagcctttgaaatgaaactcacggtctagctctgctatttccataggaaagacatgacgcccaccttggtaatgattgtgtgtcaaaattgacccaccaacaattggtaaatcagaatttgaccctgcaaaataccctggaaaaatatcaacaatgtccaataattgcgcaaaagtatccttgctaataaccattggcacatgctcagtatttaaaataatgcagtgctcattgaagtaagcataaggtgaatactggaagccccatttttcatcacctaacttcatacggataatgcggtggttagcacgggcagggtggttaatcctaccttggtaaccttcattttccatgcaaagttggcattttggatatgaggaagctttgaccagtttagcttgtgcaatagctttggggtctttttcaggttttgataaattgattgtgatttgaatatcgccatattgtgatggtgttgtaaaggcaatattttttgcgattgcagcaactttaatgtaatcgttgcgtttgctgagggcgtaaaaatctgcgatagcttgttgaggagattttgcataagtatcccagaatttacggttcacctgacttgggacaggcgtgataaaattcattagctcagcacccaaacaatctttttcagccaccaattcaccaaccttgccattttgcacggctaggtcaaccagttcatctttgagggcaataagctctgtttgcttcgtttcttgctgtacgccttcttcgccaacaagggcaagaacacgattacgcaagtaaaacatatcatcttctgtgtagtcgctaactgcaatgactttagcaacaaaagtatctaaaagtttcatttttcttctctaatcttacttattttcgagacaagacacgtgagccacctgcaatttcagcaatgtagaaagctggcgcatagccaatgatttctgtataaaccttgccgacattttgggtgaattcatcaactttatctttagagacaatggcaataccgcagccaccaaagcccgctcctgtcatacgagctccaaggacaccttcttgttgccaagcggtatgagcaagggtatcaagctcaatgccagtcacttcgtaatcatgctcaagtgacacatgtgaggcattgaccaaacgaccaaatttttcaagttcacctgcaatcaaagcttctttggcttgaagagtgcgttgattttcccaaacagcgtgacgagcacgtttgagacgattagcatctttaatgaggtaactgtattcatcaaaagcttgcaaatcaagttcaccaagtgtcttgatatcaagcacttgattcaattcttcaacggctttttcacattcggcacgacgttcattgtattttgaatcagccaattcacggcgtttgttagtattcatgataacaatgacattgtcacctaaatcaagcggcacaaggtcgtattctaatgtattggtatcaaggtaaatagcttgcttgtcagctcccataccaatagcaaattggtccatgattcctgaattaacgccgataaattcattttccgtttgtttaccaatttttactaagtcaagacggtctaagttgaggtcaaataattcttcagcaacaattccgaccaagagctctaacgaagctgatgatgacaagcctgaaccgtttggaatattcccattgacgtaaaggtcaaaaccagtattaatcgtatgcccagcttcttgcaagaatttgataactccttttggataattcgtccagctgtcttttttatcaaagacaagattagcaaggtcaacctcgataatgcctaaatcagcaaagtttgctgaataaaaacgaagtgtttggtcatcacgtttgcgagctgcaccatatgttccaagggtgatagccgctggaaaaacatgaccgccattgtagtctgtatgttcaccaatcaaattgatacgtcctggtgagaaaaaggttgcgtctgcttcattgccaaatacggctgtgaaggcttcttttaattctgtaactttcatgagggtctccttttttacttcttctatgattacggtttcattttacacctgatgatgttccaagtcaataaagtttactaaagttttacttaaatttttctttatattaatttttgtgctataataaagataagaaagaagggatgacttatggctacattaaaagacattgcaaagttggcaaaggtttcatcagcaaccgtttctcgggtgcttaatcaagatgctaccctttctgttagcgaggaaacacggcatcgcattttaaccgttgctgaagagttggggtacgaaaagcacaaacgcagcacaaatattttacaagaacggcaaaaaattgctattgtgcaatggtacagtgagcaagaagaactcaatgacctctattattacagcattcgtatcggactcgaaaaacgcgctcaagagctggactatgatattattcgttactttaataatgatattttaacgatttctgaaaacatctgtggtattattgccattggtaaattttctagcgcacaaatttcaaaactcgaaaaattgtctcaaaatcttgtgtttgttgacagcgacacactcaatgcaggacacccttgcgtgaccactgattttgataatgctgttgtcaaggcgcttgattactttatggaccaagggttcacaaaaatcgggatgattgctggcgaagaacgcacaaccgaccaacaagaactcattgttgaccaacgcttccgtactttcaaaaattacgcctatgaaaataatctctacaaccctaactacgtatttgtcggagatttttcagcacaagcaggatatgaattaatgaaaaaagccattaccgaacttggtaatgacctccctcaagctttctttgttgccaatgacacccttgcaatcggtgcgcttcgcgctctccaagaagctagtatcattgtgccagaccgcgttagcctcatctcttttaatgacaccccactaactaaacaagtctttccagccttatcaagcatcactgtctatactgaagaaatgggacggactgccgttgacatccttaaccgccaacttatcaaccataacactatcccaacaatgacaagacttgcaaccaccctaacattgcgagatagcacgaaataaaagacgttaataacgagctccaaatttaaatctggagctcgttttatttcatattttcacccaactttaacgcaaaaggcatcccatggttgaagttgatgattttcaaaatcagcaagttctgcggtattgctgataatagttgcttggtagctaaggtcgcattcaaatggttgcgcttggtctgataggttagccacaacaagataagtagcgtccgcagtttttctgagataggcaaagaccttatctgctgtctctaaaagttcaaaatccgcatcaatcaaccactcattttccttgcgaagcttgatgagtttttgataagtatagaaaatagattctggattgtctaaagcagcttggacattgatgtcctgatagtttggattaactggcaaccaagtcttatcagctgttgaaaatcctgcattcttgctactatcccattgcattggcgttctagcattatcgcgtccaatcatgcgaatactgtctagcacttcttctgacgtcttaccattttcaagcgcttctttggcaaaattgagtgactcaatgtcatcaatttctcctaaatccttgaaaggatagttagtcatgccgatttcttctccttggtagatgtaaggcgtaccacgcattaggtgcaagcaaatcgctagcgctttggctgatttttcacgataagtgtctgtgtctccccaaatcgataaaacacgtggcaaatcatgattgtcccaaaaaagcgaattccaaccctgaccaagctcaagctctgtctgccacttggtgaaaatagctttgagcgcaggaacatttaattctttttcgtattcccattttgaagcatttggcttgtgttgcagaccgatatgttcaaattgaaaaaccattgataattctttttcatctggggatgagtactgcttagcaatttctggtgttgcgccccaagtttcgccaaccgttaacaaatcctttccagccaaggtttcttgatgcatttctttgagataatcatgcaattttggtccattattagaaattaattggtctggcattttcccaatcatgtcaatcacgtccatacgaaagccagaaatacctttgtcaatccagcgattcatcatgtcgtaaacagacttgcgtaatgcgaaattttcccaattcaaatctggctgtttcttgctgaaaaagtgcaaataatattgcccagttttgccatcatatgcccaggcagagccaccaaaaatagaatcaagctcatttggttcatcacgccaaatgtaaaaatcacggtatgggctggcaggattttcacgcgcttcaacaaaccaagcgtgttcatctgatgtgtgattaaccaccaaatccatgataatgcgaataccacgcgcttttgcctgcgctagcaattcttccatgtcagacatatctccaaaaatatccgcaatcgcctcataatttgaaatatcataaccattatcatccatcggagactgataaacgggagaaagccaaatcgctgtaataccaagcttttgtaagtagtcaagtttactgataatcccttgcaaatcaccaattccatcaccatttgaatccttaaatgattttgggtaaatttgataaatggttgctttatgccaccaatgtttttccatagtgcacctctattttgatttatttgtctttattttaacgctttcttgttatttgtgcaagcgtttgcgccacaaaaataaaaaggaagctaggagtttgcccagccacctttagattataagaaagtaacttcttccccgttttctttaactgcgtagcttaactcttttaaattaatttgggcttccgcaaccacactgctaccttgattacggcgagtgattacaagcgtattttcatctaatatctctacatcaatactgccatcaaggtcaaaagcagctgattgatttcgaaaagtaaagagtttgagcaaagcttgaactactgggcgtcggacttcttcagcaatttcttcattcgtgtaataatgacgattgatgttgcggccttcttttgttttttctaacaaatcaaggtcattttttcctgctaaaaatccaacataataaacttgtggaatacccggggcaaaaacctgaatcaagcgtgctaagaaatatttcttgtcatcatcaccaagtgcagaataataagtcgaattaatctgataaatatcgagattattgtattcagcagatgagtatttacgtttgacattagcaccaactttataaagctcactggaggtataatcaatttcatcatctgtcaaaatatctttgacatcaaccacaccaattccatcatgtgtatcaagcgttgtaaattgcttcatcggcgacattttcaaccattttgccaaacggtcaacttttctgctatataggctataaagcgtcaccattggaagtgcaaaatcatagacataatagtcatgctcagcaatcttaaactggattgaatagtgctcatgaatttctggaagcaattctgtgccagattccgctgcaatgctacgcactttatcaagtaattcccaaatgtctggctccacaaagaaatcattggtatccaatttcttaactgcataagcaaatgcatctagacgaatgaggtcacatccattttctgctaggtgtttgatggtttttcgaatgaaatccatggtcacttcttttgtcacgtcaaggtcaatttgttcctcaccaaatgtattccacaaatgctcaaccgaaccatctgtaaaatgaatttcttgttttggtgcgcggtctttacgcttgtaaatcaagtccacatcaacttgtgtcggacgattttctggccaaaatttatcccagttaagaaacatatccttgtaagcactagcttcatgtttttcttgataatctttgtaatattttgattgacgagaaatatggttaatcatgaaatcaaacataagataatagttttcacccaagcctttcacatcatcccaagtaccaaatatagaatctacctcatcataatcgacaggggcaaaaccacggtcaccagttgacggaaagaatggcaatagatggataccaccaactgcctccccgaaatacttatcaagattttgtttaagttcttttaaatttttacccagactatccgagtaagtgattaacattgttttattttgaattcccatagttattcctttattttattttcatcatttatattgtgatatcgttgaactcgggctacgggcttgatgaaaaagatgagcctccttgtgccttaatgacaccgcatcacttccttatttttttcactgtgcccgctatacgccttatatattacgacgtgagaaaacaaaatcgataatattttgttttcgagctagtaaggtggttagctaagccgcaatagcggttagcgttagttaatgaattgctttagcaaccatcaactataccaagttaagttgaacacgacctacgagcagtgcaaaaaagataattttttcctagaacgtacacgttcttcgtcaaaattcctatttttgctacgctcgctatacggcctctgtatccttacttcactgcgccattactcattcctgagatgatgtgtttttggaagataagataaacaattgtgatggtaataataccaacgacatatgaagcaaagcttggtccgtaatcgctgaggtattgtcctgtgtagttgtattggaaaagcggcaatgaccatgactctgaagatttattcaacattaagagggggagcataaagtcattccagaaccaaagagcattgataatcaaagttgtggcatgcattggttttaacattggaaagacaactttgcggtatgtggtaaatttatcagctccgtcaatttcagcagcttcatccaaactttcaggaacactcagcttaatgtaaccaacatacaagaataaagtttgtggtacagcataagtcagatacaagataatcaagccccaaatatttgtcaaaccaagtcggctcatcataactgtgattggaatcatgataacttgaaatggcacgaaaattcccaaaattagcaagctatacatgatgttaaaagcgcgttttttgctcatgttacgcgcaattgaataggctgccgcaggaataaatagggttaccaaaatcaccgaaacaactgtaataatcgttgaattccagaaataatgtccaataccgtcagccaacaagcgtgtgtagttactcaaggtgacaggatttggaaaagcaaagaaatgttgcatgatatctttagtcgtcttaaatgaactaaagactgttgctagcaatggaatcaaaatcaaaattgatcccatgactaagagcacatatttccaaaaagtatgataacgttcttcttttttcatatttcactccatttatacttcgaaacgacttgataatttcaattgcaacactgacaccaaaacaataatagcaaagagaatcaaggcaatggcgttagcataaccatattggttacttgaaaaggcgtaattgtaaaccaaaagcccaattgaagttgttgaattgcttggtccaccaccagtcaaagcaaagatctggtcaaaagctgtcaaaccagctttaagcgccatgataaagaccattgaaatacttggcaacaaatatggcaattcaatattccagaacgtttgtttgctatttgcaccatcaattgctgctgcttctgtgatttcacttgggatagtttgaagccctgagaggaaaaggataattggcattgcgacaccttgccatagcatgacaaaaattgctgcaaaaatggcgccgccagatgtccctagaagacttgttttcaagaattcaatgttcaaaacttcaccaatggcaggtaatccatagttaaagacttgtttgaaaatcaaagatactgttaaccctgataaaacagctgggaaaaagaaccacgctctaaaaaaagtttgtcctttgattttagcattcaaagctcgcgctacccagatgccaatgacaatttctcccacaattaaagcaagagttaaaattaaggtaaacccaagcgccttaaagaatttgctatcagtcatcaaaattttatagttattaatccctacaaaatcaaaattataagtcaagccagtccagttcgtaaaactataaaaagctccctgaaacattggaaaatagaagaaaatagcttgtaacattaaaggaataatcagaaatgtccagccccaatatttatttaaaaattttcgcattctactctcctcctatttatttacgtcagctttcattggattgaagaatgcatttaactcactaacatattgatcagcatcttgattcaaaagatagttagctgtcaaactaaagaaatcttcttcgcttgtccaattttcaccaagccaaacatagtgtttatctgtaaatgctagctgataaagcggagcaagtggagaattgtcatcttcaaccacaccctctacagacactggtgaaccatcaacatcataatatttttgcatagcctcagctgacgccatataggaaataaatttttcacattcttttttgtgctttgttgatgatgaaattgatagcgccaaatctcccgctccaactgtaacttcttgaccagttttttcaccaggaaaggcaaatgttgaaatttcaaaatcaggatcttgttgtttaatcgctgctaatacccatgaaccacctggtaacatcaaggcttcttcagtcgcaaatgccacaacagaatcgttgtaagaagcaccttcccaattactttgctggttccccttatcagcaagtaaatccaaacgagttagaacttccttaacttcattatcagaagttgagatagaattaacgggagaaaaacgaaggtaatcatttgccttatcaccactaccagtcacgctaatgtaagccagctgatgataaccatttaaagtccatccttcactaccagcaagcgcaaatggtgtttcaccgtcagccttgatttgttttaccaaagtttcaaattcatcccaagtttctggaactttgagtcctaattcgtcaaattttgttttattaaagtaaattcctgaaacattggctgataaaggcacgctataaatttttccatttactgcatagttttctgcatagttatttttgatgttctcaagataagacttacctgtcatatcttcaaaataaccagcttttgcccactctttaaaatctacattctgaggataaatgttaatgacatctggggcgtcacctgcaagcatacgtgtttttagaactgttccagcacttggaacacttgtcattttaacgtgaatgttaggattttctgcttcaaaatccttaatgatttcttttaacgtatccaccatttctgtcttttgattgaaatattcaatagttactttgccatcagccgatgtgtcatcctcttttgaacacgccgtcaatattaaaccagcagtggtagctaaagctactatgccagcagctatcaattgtttacgccatttcattgaaaacctccttattgtttcacaaaatagtattgtttgctgagatagtcaccttgtgggagagttacggtcaaacctgcatacatgagttcagccccggagaaaacttgtcctgtttcttgtaagcgataggtatctgcttcctctaaacctttcagcttgagcgtcgtttcaattgtttcaatcattgaaagtgtgcgaacgtaagttacaacgactttatcttcatagacaaattgcacagccgcttcatttgcgccttgttctggattgataagacgataatgcttcccaaattggacaactggacgaatgtctttgtagtgagaaacctgagtagcaatcacttctttttcactttctggtaggcttgtcaaatcaagttcgtagccaagatttcccatcatagcaacatttccacgtgtttcaattggtgttgtgcgtcccatttggtgatttgggcttgctgaaacatgggaacccatagagatagttgggtacagatagcttgaaccatattgaatttgcaaacgagaaatggcatctgtattatcactagcccaaacttgtgggaagtagcgcatcattccaaggtcatttcgaccaccgccacctgagcatgattcaaagagaatattgctatgttttccagtcaaataggataccaaatcatacaaacctaacatatatgcatgggattgcatcttagtggcaagagctgagtcgccatttccgatatttgtgatgttacggttataatcccatttgacataatcaatagcattttctgtcaagattttatcgatagctaatttaatataagctaccacatcagggttggcaaggttaagtaccaattgattacgagaataagtatgagcacgaccctcagcttgaatagcccaatcaggatgggtacggtaaaggtcactatctacagaaatcatttccggttcaaaccacaaaccaaatttcaagcctttagcatgaactttatcaatcaaatcactcaatggtccaccgagtttttcttcattgacaccccagtcaccaagtgcacgattatcgtcaaatcgatttccaaaccaaccgtcatctaaaacaaagagttcaataccaagtctgcttgcttcatcaactaaatcaagcaatttttcttgcttgaaagcaaaataagtcgcttcccagttattgataagaatcggacgctcaacatgagcaaattgttttggcataatatgattttgcacaaacaactggctttcttggctcaagtgtgtcaaaccttttgccgaataagtcatcaaagccactggcgtttcaaaattatctctagctgccaattgccaagcaaagttatcatcattaataccaatccctaagcgaacttcattcaattgatttttttgaacaaaagcttgaaaattaccactataaagtagctgcaaagcaagggcactgccagcatcctccgtcgctgtcctatcacacaaaatcacagctggagtctgagcatgaccagaagctccgcgatttgaagcaatgctaaagatgccttgctcgaccatttgacgacgaactgttttctcacgcgcataagctccttgcaaagtcaccacatcataatttccagcaggtacatcaagcatagttgataaagcacggttgatgataacagctttatcggatagattactaatcttagcaaaggttgaaatagttgcacgatctgcataagctgtgtaataaagcgtcagacgcaatttagcaaattcatcttctaagataaacactaatgtttcagcaccttccattgaatgaggactaggtaatcctgttgcctcaacaactccatgtaaaatatgactatcttttaacttaaattgtgttaattcattgttatcatgttgaattttaagtgatgggcaacgaaaatcaccaaagccatgcacaccaaagatttgacgttgggtatcatagctaaacgtacgattatcgggagtcggattgcctgaaaaagcatgatctttctcaaatatcgcatttgaaccgtgatagttagcgattttacccccaatatgacgaagaagtaaatcaccttctcgattctcaataatcattgacatctctttactctgaatatagaaaagatttcctttgattgtaattcccacaagttttcctcctctatttttactaaaattttaccactaaattaccccttgttgaatggtaggatgttggacaaatatggtaaaatgttgcttatagaggagatgatagtttgaacgttctaaatacctataacgaatttgataccaataattttgatctaaatgttgaccactacggggctgaaatttgtgacaaaaactactcttttggtccaactattcgtgataattttgttctgcattttattgttgatggtaaaggaaaatttactattgatggccaaaccactgaacttggtgttggtgatatgtttatccttcccaaaggaaaagtgaccttttatcaagctgataaagaacatccttggacatatctctgggtcggatttagcggttcaaaggctgaaagtattttaagtaaaactcagctactagagcaatacttctgccactcaacacttaagtccagggttcttgatcaaatcgtcaaattaactcaatttcgcgatcaaaaacttgatgacgtgactgaactccaactgattgctgaactttacaaactacttgcttacctaatagaagaatctcccagtaaagcaatttctgatggtagtattcttattcaaaattatattagacaaactaaaaaaataattcactcacaatatggaacttctttaaaagtgggagaaattgctgataaactcaatctcaaccgcagctacctctacaagattttcaaagaagaaactggctattcgatcaaagattatatcatccaagtccgcatggaaaaaagtgctgatttacttaccaacactacttttcatatctcagaagtcgcaaacgccgtaggcttcacagatggtctcacatttagcaaagccttcaaaaaatacttcaaccaaagcccaagcaattaccgcaaaacactaaaaaattaagcaaaaagcgttaggattctcttacctaacgtttttttacaacacccaaaatcccccaagagactaagctcttgggggtgaaatgaaatatataactaatcgactttaacaagtctgacgttatcgatgtttaaccatttgttagcagaggcattgacgtaaatgccgatttcacattgtccgtttgtgatttggatgttatcaatcgtgtacgttttccatgtgctagagtctttaagggagatgttttgctcactgccgccatagtttttgatataaagctgagcagtctcaaggctagtgtcccccatggcgtcaatgcttaatttgtaagtacctgagccgaggttgctaatcgtttgataaatggaactttcaaaagctgtgtctgaccagaaagtgagcttgtaacgtgtatcgtcgtaaacttctgtcttgatacctgcattttgactgttggtccatttgttccaagaagatggggtttcggtataaccgtcccattcaaaactgttattagcaacaacgtttgttaggttagcgtaattaaaggctttgacggcgcgtagagcatttcctgagaaatcaaagaccgcttgattttcccattcattacccgtcacatctgaaacaccaagatatgacatacctgcttgtgttgcccatgagacgttgccgttataccagagtggttcccaatagaagaaaccgagaccgttgttatttttgacgtctttaattttatcaaccaagtctgtcaaaaattcatactgaccgtcttggctagctttgtaaccaccagcagtctcttctgttgccgtaaaggcatttgttttctggtcagcattatcaagggtatttgcataagctgtttcaaccacaacaacttttttgttataacgttcgctgatattatccatattttcagagagttctgctaatgtgccatgccaatatgggtaataggaaatgccgacaatatcaaaatcaacggattgattggtaatttcatcaagccaccattggaaagctgctttgtcaccaccgtctgctaaatggagcatgataggtgtattacttgtctgcgtatctttcacagcttgaacaccagattttaggaaagttgctaggcgagtgaattcttgaccatcaccaccccagcttttcccgtaaggccaaagcataccgctgtttaattcgtttccgatttgcaccatatcagggtaaatgccttgtgatttcatctgattaaggacatcagccgtgtaagaatacactgttgaatttaattgttcaaaggattgattctgccaagctttgggaagattttgttttccggggtcaacccagaaatcgctgtaatgaaaatcgagtaagactttcaagcctttatctttagcacgtttggctaatttgagtgttctgtttaagtcattggtccctgcgccgtaagcattgccatttgcatcataggggtcaacccagagtcgcaaacgaacgtagttaacaccattttctttcagaatggtcagcgggtctttttgagtaccattactcttgtaaatcgctccgctttgttccatttcatcaagaatcgaaatatcagctccgttgatgaactcatctgctttagtcacggtatttccaagcgcagcaagaccaataagtgcaacagtcgtcaaaaaaatcttttttagtattttcataatctttctccctagcttttccagaataggttaggcaaaataagacattacgaaggctacggcaccttctgggtcacgtgttaatttaatgtattcagcaccttttgtagctgctaacttgataccaagcgcgtcagtatctttcttaatatcttcgtagaatgagttaacttgcggagcaagcacaatcatatcaaaatctttcataatctcataatgtgaaccgtaagcacctgctgacgctgtgatgtttgcacctgtggcagcggcaccttcagtaagagcattagcaagcatagcacttgtaccagcaccagcacaaaggaccaaaacgttgattggtttgtcagttgtgactttaacagctggtttttcctcaacaactttttcagctgcagcttttactggagttgcactttcagcagcagtttcttgcgcagcaatttcagcttcttcttcaagaagtgatgcgtcataagctttaatgaatgggaagtagataatcgcatcaacaacgattaaaacaaggacaaggacaacagctagaaggctaacgcctgtaccaagaataagtccgattggcgctggtgttgcccaaggaagaacatacatgaagctattcatctgaagcacatcaacaaagaatttgaaaatccaaacgttggcaattggtgccaaaaggaatggaacaaagaaataagggttaagaataattggtgttgcaaaaagcaaaggttcgttaacggcgaagctaactgggataaatgaagctttaccaacagctttcaattgttttgatttggcaaatagcaagaagaggtatggaacgacaagtgttgcaccagtaccacccatagtaccaacgaagttaccaagaccaacagtcaaaacgtttgaagcatgttcaccagctttgaataattgaaggttcgtttcaacattagcatagataatagctgcgatagctggctctacgattgacggaccatgcacaccaacgaaccagaagagcgccatagcaccccagataatagcaattccaagataaccgtctgctgctgtaaacaatggttgaagaagtgtaataacagcttctgcaaatgatgtgccaaagaaataacgaatgatagtatcaatgataacagctgcaaatacggcaaatgagaatgggaagatatcacggaatgtttgcgaaatcgttcctggtacttcttttggcatcttgatagtgatgtcacgaataacacagaatttgtaaacattaacagtgataaaggctgctacaaaggctgctaggataccttttgtccccatataaccactagcaagaccaccgtcaagctcatcagcactcaacatcaagaagctgacaattgaggcaagcataacagaaaccgcattgattttcttattacctggcatcttacggttaacagattctgccaagcaacgtgcagttgttgctgaaaccagaagcgcaacgacacccattgagtagttataaatcttccaaagccaatttgagaaatcttctggcaaagtcactccgaacacatctggaatcgatgcaatcaagataaagatactagaaaagagaatcgctggcattgccgcaaggaaaccatcacgaatggcacctaaataaatgttacgagaaactttttcaaaaaaaggtttccctttttcaatttgttgaatgagtttgttcatgatacaactccctaagaacctaggcttggctagtcatctctaatacgtcttaagggtaagcaagacctgtcagaaatgactattgagataaagatactcactgaaaatcgaagtcaggctaggcgacgctgatgcagattgaactgaagttcatcaaatcaagtcaaccctgcatttgattttcaaagagtgtaagcttttaccaagccatgttccgtcctttcttttttcaaaaattagcgatttttatataattcaataaaatccgtaatgaggtcacgtagcaacaaggttgtcatcaagtggtcttgaccgtgaacaaagatgaaaccaagttccaaatcttcaccgcctgcttcttgtgctaacaattgtgtttgcgcattgtgagctttagccaaattttcgtcagcatctttaatcgctttatcaacattatcaaagttgccagagcgaacttccttaagcaattgaagaagtgtgcttcttgcatcacctgagtaagccacaatttcaaaacctaacatttgtaattcttttttatccattttctaaatcccctattctacaatttttgtatcgctaatgtgtttgtaccagtaagctgacgcttttggataacgtttttgtgtttcaaaatccacatagaacaaaccatagcgtttattataaccatttgaccatgagaacaaatccatcaatgaccaaaggaaatagcctttaacattaaccccagcatcaattgctttggcaagagattgcaggtaaactttcaaataatcaatacgcggttggtccatgatgataccatcgtcaaattcatctttatagcccataccattttccgtgatatagattttattgtaatgcgggtaatctgctttgatacgaagaagcaagtcatacagaccttctggatagataatccaatcccagtccgttcttggaataccttctttgtaaatgcgttcgccaatacctttaactttgtaaacagatgttcctttgtcacctgtaccgttgtgatgaatggcattttcgccattgtaggctttaacaaagtgacattggtaatgattgataccaagataatcgttgcggtgactggcttttttcatttcctcaaagtcactatcaaggaagtcgtagctggcattgttagctgcgcagatttcgttaagcgcttccattgtttcgtttgaataataacctaaataagttgcatccagtaagaatcgaatagaaagggcatcatctaagaaagcagcatgtttatcttctttactatctgttgctgggtattttgtttcaagagaatgtaccacaccgatttcaccttggtagccaccgtctttgaacaaattaaccacacgcgcatgcgcatacatcatattgtgcagacattgaatgacttttgacaggtcatatttgattcctggtgggaaaataccaagcaaatattggttggttgctactgggtaaatttcattgaatgtactccaatgacgaacttctgtaaattcttcaaaacagaattttgcatagttaacaaaagcttcaatcgtatcacggtttaaaaaatcaccattgtcaaacaaaacttttggtgtgtcaaagtgatgaagcgtgacaaaggctgtgatgttgcgtttttgacattccgcaaacactttgtggtaataatcaactccttcttggttgacctcaccagtaccatttgggaagatacggctccaagcaatggataaccgaagtccgttgacaccaaatttttcacaaagttcaatatcttgtgggtattgatgataaaaatcactagcaggatctggactgaaacgcccttgttctgctaagaaatcatcccaagctactggacctttaccgccttctttagtagctccttcaacttggtaggctgctgttgcaccaccaaaaataaaatcttctggtaattgatacataattttctccttatttcaataagcgttgaatgtgaatcacaaggtaaacacgttcactacgcgataaatctatttttaattcttgttcaatcaaatcataaatggcctgcccaatttgataggcttgcggataatctgatttcacatattcttccaaattaatcaacgatgcattgtcttgctggttcatctgcaatcgattaatgaggtaggttaaatgaatcatcaaacggtcgtaaagattactgttttctgcgctccgcttgatgttatttttggccaattcgttctcaatcaaagctagcacttttttagttgcatcctctttgttattatcagaaacttcgtaatcacctttggcattaatgaaatgcagagccattcgtccgacttcatcatctggaaaagttactgacagcttttgacttaaaatagcaacagcttcttgcgccatttgaaactcagtaacatacgccgctgaaatatctggtaaatgactttcctgataagctccctttaaaagcttttgatataccgaataaacgtggtcggtaagggttacatataggtattcctgaacaggaaaatgatatttggctaccaaatcatcaatcatgttataagtcaccgttagaatatcaagcggaatatttttcaaaagggttaaaaagttttctttggattcctctgttttcaaaaggaaaactttctcgactttgcttggagtgattaaatcaccttttttcttttgaaagactatccctagccccatgacaacggcttgttcatcctgctcattttttaccagagcgacattattgttgagcgcttgtacaatccgaaacattctactctcctcacgtggttcctagacaaataaaaaaccacaaacaaactagaatcctcccttctaggtcatttgcggtcttgcctaatgtcttagttacaatccactctattaatttctacggttataatataacacacaattttaattttgtaaaccctttctttgtatttttttgattttttttgtttattttaaacaaattcaaaaaatcgtaatatcaaaggattttttactcacttccccactcgctacaaaagttacttgacgtttatcttctaaaatatcactttcatcaagcgacgttgacaagccgctccacggctctagagcaataaaaggactcttattgacggttgaccataaaatcaaatttggaaaatcttcaaaatccaaacgcaatcctttatcgtgtttatgagatttcaaagaaacgctacgtgaagctaatttatccaaagtaatggcatctttggcaaacaaagcataatccaaatttagaatgttttgcttttctaaaaatggcgtacgcttattcacatcaagaagccctgtttctggaaaagattctggaacagtacaagtttcctctttttcaaattcgagataataatcttcataatactcatcagcaagcaatgggcaattaaacccagggtgcccaccaataaagtaaggcatgaccttttctgtctcgcgattggtcacttggtaacttgttttaatcgtctttccaatcaaagtgtaaatgattttcaactcaaaatcataaggataatttgccaacatttccgcatcaggggtgattgaaaaagcaaggctattttcagataatggttcataagtaaaagtcttcttacgcaccaaaccatgtcgcggtatcacacctgtaaaatggggacggctactaggacgataaatagcttcatcatcacgtaagctcccacaaatcggaaataatactggtgcttgtgaactccaatactctggatttccttgccacaaatattcgacgccgtctttatcttttatggatgacaaagcgccaccaaattccttaaactgaactgttaagaaatcattttttaattcaataaccattattttctcctaaataaaatgagaatgaacaacctcataactgccattctcatcacgcgtaaaaacaaaataataaaagaagttttagtgagttagattagatgtattactatttggcttcttgataagcttgattacgttttttcatttctcctttataccagaagaagagcaacgtgtaaacaactaaagcaatcgctgcataaagaacgtaagtcaaatcaccagttgaagctttaccaacaaagaatgccaagaatttttcaattggtccttccattgttgtatgagaaatcatggttgaagtatctaaaccacttgggaaggcacccacatttttagcagtttctgtgataaatggtgcaatcaatgttcctgaccacaagaatagcggtaactcaatagcaccaatgacaatcatgcggattaatttaccacgtgtaacaactagcaaagctggagtaacccccatcgcaataatacctgcgagtggcaataatttatttcctggtaaaacaattgcttctaacaacataattggagctaaaatattagcggcagcccatacttctgcacgacctgcaatgaatggccagtccaaaccaatatttaatgtgcgtccttgtaattttgaagaagcaaagtcagtaataccttgagaaagtggttcaacagaagcgataaaccatgacccaatcaatgagaacaattccaagcagacagctgctgtaaaagctaaagaagcaatttctgttggtgtttgacctgctaataagccaacaaagattcctaaataaataccaattgcaaattttgaaccccagaaaccaattttagcatttaatttagcagcatcgaagtcatatttatcaagccaagggaaaagcttgtcaaaaattttatcgaataccataataattggattcatcatgtagttcatgtgagttgttgtcatcggattttcatcaccagcacccaataaatcattaaaagtaggtttcataaggtctgaattgataatttttaaaataccgataaaaataaccaaaatcgttgcaatcatgaggtttgctccactataaatagcaaacaagccaacaattgataaatgccaaatatcgaaaatatcaacatcaagcgtattggttttattcaataccaacataatgatatttacaatgaccattaccatcaaaaaatatagggtataaggtgagccccaagtgatagttgccaacggtgcccaaccaacgtcagtgatatttaattccaaaccagttctggcaacaaagtcagccatagcacccgaaaatgccgttgacaagatattgataattgcgctaatacctgttaaggcaattcctagtttaataccaccttctaatgctttagtgaatttcactttaaagaagagggcaatgacagtcaagatgattgtcattaacggagcggcaccaaggtcaataattggttggaaaatcgtatttgcaaagtcgataattacattcatttcatttcttccctttctttcgaaagcgctttaatttatttgtttaagctattaataacgtcttccattttcttataaacaggttctgccattgctgggatacgataaagaatagcaccagcatcgacaactggaatcttaacatcaaagcctaaatcagtcttagaaatttgtgcaaagatgtcataatgcgataacaattcttcattgatatctttaatcataacagcatcacacgatacttgataaccacgtttagtcaattctgtttctagagcgtttttaatttggtgacttgagttaaccccagctccacacgctgctaaaattttaatcatgagaaattcctccttaaaaattattttccaaaaattgataaattctttctggattttcagaattaaagaatttaattaacgcttccttatcttgtctattaataaaatccattatttctgccaataaaccagcttgctctttttcttcattgtttaaaatcatgaacaaaaatgaaacctctagtttttcatctggcaaaatcatattatgaaaagttatcgcatgttccagtttaactggaacaatacgagtaacatttacaaactgactttctgtatgtggaatagcaatattgggaagactcgaatcaattggacttaacggtaaggcagtaggataatgttcctctctgtcgattaaattatccaagtattcttctgttacaagacctttttcaaataatttatgagcgatttctttaaaaacacttttttgatcttgttgttcagatatatataccgtatcttctgcaaataattgagtcattttatcaccttcttacactttctcactccatgagctggctgttttggtaaggactacgttgagttcttcgatattcttgcgtccttgtgttcttagccattcacgcgctgcggcttcgccttcttcgatatacacttgtacagaaccagcccaagtagcacgtccgcaaaggacaccgttgaatttagcacctgattcagccgcaaataccaacgtttcttggaaaagctttgctgaaacacctgcgctaagatagatatatggcaaatgacttgctgcttcttggtctttgaaagctttagcagcttcttctttagtgtaaaccacttcaccgtccgcaaagccttcaacatatttcatgttgacagggacttcaaccttgagcacatcaataccaaagcggtcgtcagaaaaaactttcatggcttcgttaactttgtgaggttttactttggcaaatgctgcgcttgtattgtcagtgatgttttcatcataagtcaaaatctcaaggaagaatggcatatcttcagctttacattcggcaccaatgcgttcgatataagcttgtttttgaagattaacgtattcatcaccatcaacgtcataataaagcaagaatttcactgcatcagctccttcttctttaagacgtttagcagaccattcgaccaaacaatctggcaaacggctagttgttgtcgcatcataacctgttttttcataagcaagcaaaagtccagcattcgcatcacgaaccttacttgctggcaaaccatactcagggtcaagaagaatagatgacgcatacggtgtcaattcttctgaaaccaaggctttcaattgttcgatttgttcaacacttggttcttctgtttgatagtttgccatcatgcgtttaagtgctccacgttggtcaaatgccaaagcagaaatcacgccatcacggctaagtttctcaagtaatctgcgtttttcttgtgttaataccattttttcttatacctcttctacctgaatttgattaaataagttttcgtaatttgtcatattgacatgacctgtcattttttcttgagcgtttagcataccaagggcattcgcatgacgtaagaaatctttgtcggaaaggttatggataatcgctgacgcaataccagccaccgttgaatcaccagaaccaacaggattgaccacatcgatttttggaatgataatgcggtaatagtggtcaccgtgtttcgcaaaagctcctttactgcctagtgaaacaaccacccaatcaatccctgcaaacaaatcatcttgcaagatttcttttaactcatccacatcatctgtcacttctcttccaacaagttgtgataattcttctgtgtttggcttgataacaaacggtttgtcatcacctgttaaaacagcttccagagccttaccagaacaatctagcaccacttttttgccttgcgaattagcaagtccaatgactttttgataataatcgctttcaagccccgctggaaggctacccgaaatcgtgatgacatcataagacgggcaaaggtaacgaaaatgattaagaaaaccatctgcctcatctcggtcaaccatcggacctgcttccaaaacttctgtctgcaagccttcatgtaaaatcgcaatgcaattgcgggtttccccatgaatcggaaagaaacgatgttgaataccattttgctcaagcctactggttaaaaagtcaccgagctttccaccgataaagcctgtcgcagtcacgttatcaccaatttctgacagcacacgtgtgacgttcaaacccttaccacctgctgttttcttaacctcggaaacacgattgaccgtatccaaagttagttcatcaagcggataagaaatatcaattgacggattcaatgttacggtaagaatcatctgattttctcctagtcgtgatattcgccacggtcccatttttcaagaaattcatcaaagaaatctggtgatgtttggtcctcattaaccgtttcgacttgtgcaattttttcaatcaaaactttattttctgccgttggtttgtattcagctttaataaaggcttcaataatatcgcacatgagtaattcacctgtgattttgccaccaaaaccgatgacattagcatttaattcttctttggcgtaaatcgctgttgtcatatcgcgaaccaaagctgaacgaatgcctggaactttgttgacagagttgttgattccaacacctgttccacagatacaaacacctaaatctgcttgaccgcttgtcaccgcttcaccgacttttttaccaaagataggataatgtgtacgtgtgtggtcatatgttccacaatcaataacctcatagccttttgatttcaagaaatctgacactgccattttttctgttgttacgatatggtcacatccaattgcaattttcattttatcttcctcgctcctaacacattttattcaacatatcaacacggatttggtgacgaccaccgtcatagtgaccttccaagaatcctttagcaatatttttagctaattcgacaccgactatttctgcacccatggtaatcatacgagcattattgtgagcacgtgtcatgtaagcagagcgttcatctgaaacttccgctgcgaccattcctttgactttagttgctgtcataaagctacctgcaccataagcatcaatcataataccaagattgccttcagccgcattgacacccgccacaacagcaagtgtattatcaacaaaatctttagtcacatctgtcacatcattaacatcataatcatttgcaagcaagtattctttgataatatttttcaaagtttcacctgcggcatctgaaccaagaataactgtcattttaacacctcaaaatttttcttttatctagataattttttaaaaacgtttttttatgtttatataataaatccaaaacaaacatttgtcaacacatttgtttaatattttttaattttgtttgttattttatgtttgttacgaatatagttatccccaccaaatcattgatagtattagagttgtcagctttattacagttctgtttcataatgtttcttttttttcttatttgttgagtttgtctgttttttatgataagataaaggtaggatgtcatttattatgcaaatggaaaggagatttttatgttaaaaaaagaacgcctccagtggattcttgaaaaagtcaatgccaaaggtgtcattactgttaatgatgtcattaaagagcttggcgtttcagatatgactgtcagacgcgacttagatgaacttgacaaagacggattacttatccgcatccacggtggtgcacagagcattgatagcccaaaaatcagaagtaaacacgaaaaatcaaacactgaaaaacaagaactccaaattgaagaaaaacgtgctatcgctaaattcgctagtcagcttgttcaagaaggagaaacgatttttattggaccaggaacgacactcgaacattttgcaagtgaactcgtcgccaaaaatattcgagttattacaaacagtttgcctgtttttaacattttaaatgaaaataaaaacaccgatttaatcttaactggtggagaatatcgtgatattacaggcgcttttgtcgggtctttgactgccaactacctccaaaacctaaaattctcaaaggcttttgtgagtgccaatggcgtgtttggtgattctattgccacatatagtgaaagtgaaggagaaattcaacgtatcgcacttgataacgccattgaaacattcttgctcgttgaccatgaaaaattcgacaaatacgacttttacgatttctatcgcattagcgacatcaatcatctggtaaccgattctgctattaccagcgacaccaaagaaaaattcggtcaactaaccaatattatcgttgccaaagactgatttcagtaataaaaaaggagtgggaaaaataaagtctccagtggagactttattcatgagcctagaaataaaaaagcgaatcagtagtttcacagaaacttgatttctcagcaagtctcagtttctagttgctgacctaaaacggtctattcccagattcttgaagtccaaactactgcgtcttgcttattacaactacataattaaagaggctgagcacttgtctcagcctctttttttaaatttatcaatcagcaaaaaatccctacaccagtaagtgtaaggatttttgtgttgtattctagaatagttttgtcttggaaaaattagcgaatagctgcttctgtttcagggtcgaagaaatgacctttagccacatttaaagtcaattcaacttgttcacctggttcataagtatcacgcgcatctgtacgtgacacgagttcaacatcaccagatttgacataaagcattgtttcagcaccgagcaattctgacacagttacttctgctttgattgttgcaccaggataagtatcacgaactaatggattgtttgaaatatcttctgggcgaataccaaagataacttttttaccattgtaaccttttgtttcaagcaattttttttgaccttctggcaaagtaatcttgaagccagcatcattgaccaaagtatcgccttcaaccgttgcttcaaagaagttcatggcagggctaccgataaatcctgcaacaaatttattagcagggcggttataaagttcttgtggtgtaccaatttgttcgacacgaccaattgttcctgaaccgtcaggattttttgtagaactcatgataacaatacggtcagcaagtgtcatggcttctgtttggtcgtgagtaacgtagattgttgttgaaccaatacgacggtggattttagcaatttcagcacgcattgacacacgcaatttagcatccaagtttgacaaaggttcgtccatcaagaacactttggcatcacggacaatggcacgtcccatggcaacacgttgacgttgaccacctgaaaggtcagcaggtttacgttgaagaaattctgtcaacccaagaatttcagcagcttcgcgaacacgtttgtcaatgtcgtcttttttgtattttctaagttttagcccaaatgccatgttatcgtaaacagtcatgtgtgggtaaagggcatagttttgaaaaaccatggcaatgtcacggtcttttggtgctttgtcattaacaacttcaccatcaattttaagttcaccttctgtgatgtcctcaagaccagcaaccatacgaagtgttgttgatttaccacaacctgaaggtcctacaaaaacgataaattctttatctttgatgtcaagatcgaaatcttcaacagcataatgacttgcatttggatattttttgtaaatgtggttaaggtttaattctaccattttgtaactcctttgatctatgtggctttattatagcaaagataacgcttacagaccatagacaggagtgacaagattttttgtgcaaaatgcccaaaaattatggcatcatgattaggagataacaaaaagcaaggctatcaagatttttcaaattcaaaccagacagcaatcgaaatttttctaatttatattgaagtgaatttcgatgaatataaagactttgtgccgttttggcaagatttccctgctcctgccacatggcaacaatgatagctcgaatatccttgctatcatcaatagattgtaatattttgtgttttatcgttggaatatcaagatgacgtgcaaaatctaacaacaacatttcagaaaacgtcgccacccgttcattaccacgatagtgactcacatcagaaaaaagcttggtttcttcatcgaaataagcttgcaaatcatttgcttgcaatttactccagctattgccaaagaaaacagtcaatttaatcccaaaatcactttccaaagtcggtaaaacatcttttaccaattcttctacctcaatcggctctgattggtccaacaaaagaatggtccgattatctgaaagactaacttctgtaatcatatttggcaaaagagttgctaaaaaatcaaccaattcttctggtaatcgatattggtggtcaatgtaaatcatctgaaggcgtttgtactcttggggtaaactgccctttttttgcaccaaatactgataccaaggattttcagaaacacgactagctgaaatcgtcgtctttttaagcgtcagcaatgctttttcacgctcactaagactggctagaggaagataataaggcgttccattttcttctaaaataagccattcttctggattttggatatttccttttgatgtcgcttcaggaaacaattcatctagtgacatgatttacctccatttttaataactgttgcgaaattaataccagttttatattaattaaatgcaataagtctctacttcaatcaagggattagcgtgccttagtatccaagataatggtaacaggaccatcattgacaagactaacgtgcatatcagctccgaaaacgcctgtttcaacaggaacgcattgcgctagtgcttcattgaaggcattgtataattgctcagctttgtcaggtttggcagcaccagtaaaggctggtcggttaccctttttcgtatccgcaaacaaggtaaactgtgacaccgataaaatacttcccttgacatcttgaacagataaattcatttttcccatatcatctgaaaaaatccgcatattcgtaatttttcgcaccgcataatcaaggtcctcttgctcatcatctggaccgaccccaaccaaaagcaacaagccttgtttaatatcaccgacaagctcctcatcaatcacgacttgggctttcttgacacgctgaataacaactttcatgtacaatcctttctaaaaaagcgggctgaccgagtcaactcgcttgaaaaacacactcattacccatttgttcgtttgacggagtaaacatctggaataattttgattttatcaacgacagttgtcaatgctgttaagtttggaatagcaaagctgacatgaatattagcaaatttcatatctttacttggttgggcattgacagttgaaatgttcttagtggcatttgataacacttgaagcacatcattgagcaaacctgaacgattaagtccgtaaatgtcaatttcagccaagtaatcattgctggcactagtatcgtcccattcaacttcaataagacgttgttcgtaaccctcttggctcttgatattatgacaatctgcacggtgaatagccaccccacgccccttagtgatataaccttcgattgggtctcctgggactgggttacaacatttggcaatacgcatcaagagacctgaagctccttggataataacaccattttcgctacgaactttcagaacatctttgttttcagttttaacttcgccaccgttcatcagttcttcggcttcagccttcgccttcgcacgttcttcctcacggcgttctttttctgtcaatcgattaaagacagaagcagcgctaatttcaccaaaaccgacagcagcatacaaggcttcttcgctacgaacgctaaagcgtggcaaaatttcttcaatatgctttttatcaaggtatttattagccacatagccttgctcttggaaataatccactaagagctcgcgacctttattaattgaggtttctttatcttgatttttgaaaaattggcgaatgcgattgcgagctttattggttttgacaatcttaatccaatcacgacttggaccaaatgaattaggattagtgacaatctcaaccacatcacctgttttcaatttagcggtcagtggcaccatacgtccgttaaccttagcaccgactgccttttccccgacctgcgtatggatagcataggcaaaatcaatcggacctgaatcttttggcaattcttgcacagcacctgttggtgtaaagacatagatacgttctgagaaaatatcctgcttaaccgaatcaacgaaatcaaccgcatcaccatttgaagcgtcttgcaattccaccaattccttaatccagttcatgccgacagcttgttcttggttgtcaactttccctttgataccttgcttgtaagcccagtgagcagcaaccccgtattcggcgacttggtgcatttctttggtacgaatttgaatctcaatcggaccttttggaccataaactgtcgtatgaatagattggtaaccattagctttaggcgcagcaatgtaatccttaaaacgaccaggcattggacgccacaattcatgaatataaccgaccatggcataaacatcgctcggcgtttccataatacaacgaatggcaatcaaatcgtaaatttggtcaaagcgttttttcttgtcacgcattttgcgataaatcgagtaaatgtgttttggtcgtccgtaaacttcaccataaagcccttgttcttgcgtgtaatccttgattttcttaacaatttcgtcaaccaaagcttcacgttcacgacgcttttcattcatcatgtgagaaatcttgtagaactcaatttcattaagataacggaaggacaaatcttccaattcccacttgatacggctaatccccaaacgatgagctaggggtgcatagatttccattgtttctcgtgaaatacgctcttgcttatctttacgcagatgttttaaagtgcgcatattgtggagacggtctgccaatttaaccaaaataacacgaatgtccttagacatcgccatcaacattttacggtgattttctgccaattgttcttcatgtgatttgtactcaactttaccaagttttgtaacaccatcaacaatatcacgaacatctttgccaaattccgcttcaatgtcatctaaagtaacttcagtatcttcaacaacatcatgcaaaaaaccgcaagctaccgtcaccacatcaagatgcaaatctgctaaaatacctgcaacttggatagggtgaataatgtaaggctcacctgattgcctgacttgagaaatatgtgcttttgttgcgtaatccaatgccttttgaacaattgccacatcagattcgctcatgtattgggctgtgagtgcaaccacctcttcacccgttaaattcacagtttttgccataaagacctcttcagattgatattgtatttattttaacactaaactgcctaaaataccaattcataagccaaaaagccacgttttggaaggagaaatgtgctaaatattacccaaataagaaataaccaagcttagaacaaataaaatttggcgaattggcgcttattcctcatttcttgctgactgaccgacaagcctaaaccactgcatctagcaatataatgacataaagaaagctgagcacttttgtctcagcttcccttcactctttttcaactcattttctacctaaaatctggtgaatcttgtcgttaaattttggcaagtattcgtgaccgtattctgggtaaaaataaagttttttcggtgcctgaatgtggttataaacagcaaattgtgtttttgggtgacaaactcggtcttctaagcccatcgcccatatcacttctgcttggatacggtccaccaaatattgaatatcaacataatctaaagcggcaaatacagcttcttctcgttcatgaagtgggtcacgatagcggaaatagtatgccaactcctcataagctgattgtgtgacctctaaaccatatgcggtacgataatcgcttaaaaagggatactgcacaaatgtccgtttaacctttggacacagcgccgcacagacaagcgctaaagctccgccttgtgatacgccgtaagaagccattttagaactatccacaaatggcagacgactcaccacatttgtcagttggtaaacatcctgaaaaaccgcacgataaaaaagcttctctggaccgtcctcaatgccacggataaggtgtcctttcaaggtgccaccacttgtttgcaaacggtcttctgactcgccaccttgccctcgaacagacaaagcaaccacaacatagccttcagacacaaaagctaatttatccgaccaatcaccgacatcactatgataaccatgaaattgaaaaataacagggtgtttcgcactcgatttctttggcaaaagcagttgagcatagatttttgactcatgaacacctgtaaaatacaagtcataacactctgccacttttgatgtaaaatcagtcggcgtcaattcataatgaagccccagcgaatccacctcttttttggctttatcccaaaaatcatcaaaatcatcaggcttatcttgacgcccttggtaattgccccattctctcaaagcatcctctgttttcattgcctacctctactttcaataaataaacgttaggcgtcttaggatttcttgagcaatgatattagcgccagccaatgttgggtgaacaccgtcatcacctgtcaattcacgtctgccataaagcaatgcctgctcattcatcaagccatccaaaggaaccaattccaatttaaactcacgcgcaagatgacggacaatttgaatcttaggatccaaatctcgacgccattccatacggtcttctggataatccaacacaaatggttccattaacaaaatgcgctcaattcctgcttgtttcaatgcttgcagaagctgacgatagacattttcaaaacgttgttgttcttcttgactagcaaagccatctttaccaaccaagtgccaaacatcattgataccaaccattaaaatgacagcatcgggttggcaagataagcaatcatccacacgatttaacaaatcttgaaccttatcaccaccaacacctcgattgtaaaaatgcaatcctaactctggagaacgatccagtaaatctgccgctacaatgctcacatagccatgtcctagactgtctggattacttttatcacgtccccactccgtaatgctatctccgaaaaaaacgatacggtcatgtttcctaatttccataggttgcctcacttagtgtttaagaaatttgaaacggctcctaataaattggcgtcatttttaaattgacaaattttaagttcgtaagttaattcattggcttcagtgtcatgaattaatttttgaatacgtttatcaagttcagataccaaatctggtcgaactgagataccgccaccgataccgaccaaatctgggttgaagctgacaaggcaattgaaaataccagtagccaaagcatcatacaaacctgccaaagcagccttagcttcttcatttccattatctgctaaatcaaacaaatctttcccagaaaaatcagttaagccatgagctttagcataacggtcagctacttgaactggactagcaagcgtgcttaatgtcttaccattttcgataatcatatagccaaattcaccacctaaaaggctgctacctttgtacaattgaccattttgacaaactgcaccgccaataccagaaccaatgataaagtaaagagcatttttgctgtcttgaccaataccaaatttgctttcagctagacctgcacagttggcatcattttcaatagcaacaggaagcccaaacaaagcttctaattcatcaacaattttgaagcgatgaatgtatggaatcgcactaagccctttgataacaccttcttctgtatccacggcacccgggcttgatatggcaacaccttttgtatcagcatctgataattctttaaagacttgatacagattttctttcatttcatcccaagtttttggcgtagcaaaagagcttttcttttcgatactaccatcttggtaaagaccatattttacagatgttccaccaatatcaaacacaactaaattcatttttttctccattctaagtgacggagattgccattaattatgtgttaaaacaatctccactgaaaattcatcataacggtgggtactgattgaatactcaaaagcggcacctgtgcttaggtaacctgtttgaacggcaatcgcaactggatcacctttttccaagtctaggtattcagcttccatatccgttgcacgacgtactgtaatcgtacggtgaccagattggatttttagccctaaaccactttcgatataatcataaattgagctttcaacatgctctaatttcagaccgttaattaaatcaatcggcatatatgtttcttcaataaccgttggtttatcatcaacaatacgcacacgatgaattttgtacacaaaacttgtttctttaatttttaatttgtcagcaatttcaggcgttgcttttactacagaaaagtcaatcaccttacttgtaatgtttttgtctggatagaatgcggttgtccccatcatttgaatgtccatcaacattttttccattttttcaacagataggtccatcacaaaagttccagcaccacgacgcttgtaaattaatccctctgcaactagcatgtccaaagcctttttaaccgtcattttactaacatcgtaaaattgacaaaggtctttttcaaaaggtagttgctcatttggctgataaacaccttctaagattttcttgcgaacatcatttgcaataagattatatttttccattttttctcctctgctcattttgattactcttttccttacctttattgtaaactagaacgcaagaagttccaaatgttatttatcaatttgttgcaaataataaatttttccgttaaaatcacccggcatttcgcgtgaccaatactcattttctctaccgatataattttttcctaaaacaataccgatagaagttaggtcacgtccataccttacctcgtctttatcttttccgagaatatgataggctttatcagggttgagaccaactaattttaagcgttcgtaaattggatttggttgcgccaaaatcgtataatagccaaccaaagcttctgttctttctttattgacaaccagccagccgacatggtttttgtccgtcaaatccaagcgatagaaaataccattttgaatcaattcttgataggcatggtattctttaatctgcgcttttacagcttctttttcctcttctgtcaaagctaatggatttaattcgtagccaaagacaccaaacatggcaacgtcttttcgcatatcaagtgatgtcacacgtgcgacttgatgattaggcaccgctgaaacatgggcactcatggttgataacggatagaccatagaagtcccccattgaatagtcaaacgttccaccgcgtccgtatcatcacttgtccagatttgtggcgaataataaagcattccagggtcaaaacgtgccccgccacccgcacaagattcaataagaacatcaggaaatgcctgatttagtttttcgtacaagctgtaaacacccaagatgtaacggtggttaacctcaacttgctgtttacttggcaaatgacttgaaaaactttctgaaatgtagcggttcatgtctaacttaatgtaatcaatcggcaccgttgataacaagtgtgccatttgactgtaaattgcttcaaccacttctggattgccaaaatcaagcacaaattggttacgaccatgcgaaatatttttttctggattgccaatgacccaatctggatgttctttaaacaaatcagtatcatcagagaccatttctggctcaaaccaaagtccaaacaacattcctttttctttgatagccttagctaaatgagcaagtccgtctggtaatttttccttgttttccgtccaattaccaagtgaacccgtgtcactatttcgcttgccaaaccaaccgtcatccaagacaaaaagttcaattcctaatttactggcttcctcagccacttctaaaatcttttcttgattaaaatcgaaatacatcgcctcccaactatttagtaaaacagggcgttttttatttttccatgaacttcgtattaaatgttctttataaaaatcatgaaaaacctgactcatcccattaaagcccgactggctcacaaccaagacagcttcaggagattcgaacagctgtcctggatgaagttgccaatcaaactggaagggattaatacccatttgtatgcgtagggtattgtagttgtcggattcaatttgggctaaaaagcttccactataaatcaaactaaagccatatacttgtccattattttcggttgcttctggtgaacaaatggcaaggaaagggttgtgaacatgactgctgtgccctctcgtgcttgaaatattttggatacctttttgaatggaactacgcgacaaatgattttcacgtgcccaagcaccatctaaatgaacccagtcataattctcatttggaaggtctaaactaaaactagcaaaacgtttaatcgagaccgtttgtgtgtccttgttaatgattttttgctgacgcgtaatgataggataattcgcataaatcgcataatgtaattcaagctctaaatcagcatagtcatctttcaaacaaacaatcaacgtttcaacatcctcttcatttccaaaagtccctggaagagcacccgttaccgtttttcctttttcaatacgatagcccacatagcgaaaatgtgaaatcaaatctcccgtcggatattgaatttctaaagcaggataacgaaaatccgtcgtcccaaatacaggatactcttgcttaatatgctcaagcgacattaagctcgaccccatataaagattatttcctgggcgaatttcacgctcaatcaaaaaggtaaacgattcgtaatcagaaatggcaggtccgcaatataattgctctaaaatccctgttctctccattactctaaacacatacgatacttttccattggtcaaatgaaaagaaagttcttcctcattaatgagaatcatgacttgactcctttaaattgtactttttgaatacgtccaacaagataaaaataaattcctggaaacaataaccagcccaacattgttttggttaatgttaaccacacaaagataaaagcaagaagaaaggctaaaataaccttttgaaagtcctgtttcatttcaagaaggctttgataaaactgattttctccgcttgacgactgtgttttaacgtaataaatcacgataactaaccaaactagccaagcaagcccaccaatataaaacatggcaaacgatagctggctgatattgaccagactaagtagccaaccagtcaatcccaagctaaagaagaaagtcatcatagccgaaatcactttagcataaggaatactttctttttgctttaacaaatctctaaatcgcaacgtctgaggattttcagaagtgaaataaagagacactatctttatggcaaagacccagccataaacaaaacctctacttagcaaagccagccagaagagcactgagcccttcatgacggtataaactaaattaatagcgtctatcaaacgcgatgatttttcggtcatagctgttcctttctagacaatttctaaatctttctattttactgaaccagcaacaccattgtagatgtacttttgaagtgataaaaagacaattaaaattggcaaaataacgatgacaacccctgccaaaataacaggccaattagttccgtaaggtcccttaaaggcaaagagcgctgttgaaataactttcaaattacggtctggcatataaaggaaaggattgtaaaagtcattgtaaacaccgacaccactgataattaacatggtaacaatcggagctttcaaatttgggagaataatgcgccagaaaatgccaaaatgactagcaccgtcaagataagctgattcatcaagagaaattggaatttcatccagatattgtaaaaagacatagacggaaataacatcagttcccaaattgagcaaaataactgaccaaattttgttaaacaatccaagtgaattgatgatttggaaagttgcaacttggctagtaatacttggaatcaacattgccaacataaagagcgtcaagataagctttttcagtttaaaatcaaatcgactaaccgcataagcaaacattgaggcaagagtcaatttcccaaccatactaaccacaaagataatcaacgtatttttaaaaccgagcaacatttgcccattcacaaaagccgtcttataatttgagaaatctagtgattttggtaattccaaaacacccgtactcaaaaattcagtatttgatttgaatgagccgataaagacaactaaaatcggtaaaatcgcaacggttgctccaattagcaagataaggtattgaagaatttttccaaatgttatttttttcgttttcatcagacattcttcctttcactagtaacaaccttttgaatcaaagaaacaacaataacgataaacaagagaatgattgccatagccgatgccaaaccgactttattgtacttgaaggctgtatcaatggtttgaataacgaaagttgatgtttcatttgaaccgcctgtcatgatatatggaatatcaaagacgcttagtgaaccactcacacccaagataatattaagaaagacaatgtttcgaatacttggaatgataatgtatctaaattgatcccagcgattagcaccgtcaatctcagctgcttcatagacttcagggttaatagactgaatcgctcctaagaacaccaagaaattaaaccctgtgtaacgccaaacagatgtaaacgcaagcgagatattattgattgaacggtctcccaaccaaagtctgatttggtctccaagaccaatagctttcaaaaccgtatcaagcgttccaccgcctttatagaaataaaggaagataaacccaatcgcaacaccatttagaagatatgggaagaataaaatccctttccagaaattagcaaacttcactttgaatgaaagaatcgtagcaaataacagtgcaattcctaattggaaaaatgttgcaataaagtagtacagacttgttttaaaaactgaaaaataatttggatttgttaaaaccgttttataattatcaagcccaacaaaatttggatcttgactgtatccattccaatctgtcaaactgtattgaatcatttttatcaatggataatatgaaaagacaagcaacagaagaactggaataatggtgaaagagaaaacaagaatccgtttttcccattctttactcaatttactttttgtcataataacctccaccatgacaaagatgctttcgcatatttaacactaaatgagcataagtaagggagccagacatttttcgactcccaaactttcccatctcactaaattgaattttagttatctgaaactgccttgatggcgttagcccatcgtgtgttaaagtctttcataatgtcatcaaatgattcttttgaatttccaacagcagcgtcaatgatacgttgtttttcagtatcagtagaaccgatacctaattcagattcattgttaatgtcgctaaagagtgattctttaccttctggagccggattttcttcaatcaattcaacacccgcatcttgactatcttgaagtgcttttggatattctgcacctttcacggttggaataccaccgttgtcaacagcgtagtcagattcattaaccatccagtcgatgaatttgcgggctgcttttttgtgtttactgttaacgttaataccgtagttgtagtcaccaccgattggcatatattgtttgccatcagatgctgttactgggaatgcttcaaacgtaatgttgtccgcattatcttcattggcttcttgaacttgtggaactgcccagcttccaagtaccataacagctactttaccatttgctaagtcaacttttgattgttcccaatcacttgttgtagggtcagattcaatcaacccttctttagctactgtgtaaagcgtattgtagatagtgtacattgtgtcaccttcatcaaatggtgatgtatctgaagtcatttcattagtgaaatcagcgtcacctgacacacctgtacgtgtgaagtcccagttagacaatgtccaaccagcagcgtagtttgtgtaaagtgggacaatgctactatcattttcttttattttcttaagtgcagcaatgaaatcctctgttgtcttagggaattctgtaatacctgcatcttcaaagactttcttattaacaaccaaaccagtcgcattcatttggctcggaataccgtattgaacaccttcatatgaacggtcattaagtcctaagtatttttctgataattcttctgtatcaccaagtggttcaaagaagttctcataatctttcgggctaatatcaccaggaatcattaaaacgtcgccgtactctttactgttcatacgagttttcatttgacctgcataatcagtaatggtttgtacttcaactttaatatcaggatatttctcgttaaattttgcaatgtactcatcccatttaccgttagtttcccaatcggtcttatggttgatgaatgtaattgtttcaacatcgctatcactgcttccgcttgaacaaccaactaatgtcacggctgctaatgcagtcatcccaattgtaagcaaaccttttttcataggttcttcctcctaattttagcttctttttgtttgcgcttacattataacactttgtatcttaaaagtatatacttttattaaaaatattttttattttttcagctaaaataacttttctactatatatgacctttaaaaaaatttttactgttgtttatatgacaattatatttctttttctcttaggaaaaatcatggaaaacgcgtccaaaagactacaaaaaatagtcttttgctattttttattacaactagttgacaaggtgtcaattttatttccttacattatatggcataacaaaacgcttacataattttttaaaaattcaaatttattttaattttaggtatatactttttaaaaaacttgtgttatactcattttggaagcgcatcctaaaagttttttattgtttttgtatacaactactagtagtttgtaaagaggagattttttctttaaaaacattatttcataacattcagagatgacattatgtcttaacgctttttttgggaggagaaaaaaaacattatgaaaaaagcattagttggatctttagcgaccctaactgtcgttgccggtctcgcatcagctcaaggggtaaaagctgacgaaatcgtttcaggacagacttacaaaatcactgcaaaacatagtggtaaagctcttgacgttgcatcaaaagcaacttacgcaggagctaacgtgcaacaatggtcttataacggcggcactaaccaacaatggaaagttgttgatacaggagacggatactacaaattagtatcagtaaacagtggtaaagtgctagacgtagcaagtgcagcaacttacaatggtgctaacgtacaacaatgggacgatactaacggaacatgccaacgttggaaaatcgtagatactggtgacggttcttacaaactaatctctgctgtcagcggtaaagctcttgacgttgcagcaaactctagcgatgacggtgccaacgtacaacaatgggatgacaacggtggttggaaccaaaaatgggaattcacaaaagtaagtgacagtggaaacactggtggtgatactggtggcgacactactactccagtttcaactagtggtttctacacaaacggtactacactttatgacgcaaaaggtaatccatttgtgatgcgcggtatcaaccacgcttactcttggtaccaaggttatgaagatactgctattcctgccattgcaaaaactggcgctaactgtgttcgcttagttatcacagatggtcaacaatacagtaaaacttcactctctgaacttcaaaaacttattcaactttgtaaagataacaaattaattgctatcgttgaagtgcatgacgctactggttcagataacattcaagacttggaaaaagctgctgattactggattgaaatgaagagtgctttgattggaaacgaagcaaacgtcatccttaacatcgctaacgaatggggcggtgcttgggatagttcaaactgggcagcaggttaccaacaagttattccaaaacttcgtaatgctggtatcaaaaacacacttatggtcgattgtgctggttggggacaatacccacaatctatcgcagaagcaggtcaaagtgtcgttcaagctgattcacaacacaacatcatgttctctattcacatgtacgaatatgctggtgcatacggtgcagttcaatcaaacattgactctgcacttaacgtaggtgtaccactttgtatcggtgaattcggtatccgacacactaacggcgatgtagattacaagacaatcatgagctactctcaatctaagggagttggttacctcggttggtcttggaaaggtaacggcgacacttgggcttacctcgatatcgcacaagattggagcggttcacaattaactgaacaaggtaacgctattatctatgaccaaaatggtatcaagaacacatctaaacgttgtacaatttttgactaatacaattcgtatgtaagtcattatctgacaactccatattctcgactggggaaaggttatcgtgttgacctttcttcagttttttatatcctgtaaatttaaaattttctgaacatttgttataatattagctagacatgtttaattctaaaggcttttaacgcttttagagaaaggagagactcatgaaaaataccgtattgagctttcaaagggccaaaaaagacggtaaaaaattaaccatgttaaccgcctatgattactcaactgcaaaattaatcgacagtactggtatcaacagtattctcgttggtgattcacttggaaatgttgttttaggatacgacgacacggtttcagtaacactagatgatatgattcatcacggaaaagccgtttgtcgtggggcaaaaaatgcactagtcatcgttgatatgccttttatgtcctatcagatttctgtcgaacaagccctagaaaacgcaggacgtttgatgaaagaaacgcattgtcaagccgttaaattagaaggtggcaaaagcgtttgcccacaaatcaaggctatggttgaagctggcattcctgtctgtgcacaccttggcttaacaccgcaacacatcaacgctttcggaggtttcaaagtccaagggagaaccgaagctgctgccaaacaactcattgaagatgccaaagccgtccaagaagctggcgcattcgctgttgtactcgaagccattccagccgagctcgctcaattaattaccaagcaactggacattcctactatcggaatcggtgctggtaaccaaactgacgggcaagtgctagtctatgctgacttgttaggattgttctctgatttcacacctaaatttgtcaaacgctacgctaacattggtgaactcatctctggcgctgttaagaattatattgacgacgtcgcaacgcagaaatttccaacaccagaaaatgaatatcacattgatgacactatcatcgaaaaactctattaattagaaaagaggcatatcgttacatgaaaatcgttcataccgttgaagacgtccgcaaagctgtgcaagcttggaaagcagacggaaaaaacattggacttgttccaaccatgggttacctacacgaagggcataagagtctgattgacaaagccgttgccgaaaacgaccacgtcgtcgtcagcgtttttgtgaatccaattcaattcgcaccaacagaagatttagaaagctacccacgagatttagaacaagatgccagactttgcgaaaccgctggcgctagtctcatcttcaatccagagcctggtgacatgtactctccaactttttcaagtttcattgacatgtcaactctaacacaagggctttgtggcaagacacgtcctattcatttccgaggtgtctgcaccgttgtcggaaaactgttcaacattgtggaaccaaacagagcttattttggtcaaaaagatgcgcagcaactcgctgttatcaagcacatggttgatgatttgaatttcaaccttgaaatcattggttgcccaattgtccgcgaaacagacggtcttgctaaaagttcacgtaacacttacctctcagcagaggaacgtcaagctgcccttgttctttcaaaaagtctagcccttgctgaaaaaatgattcaagacggtgaaacagacacagataaattaaaacaagccatgactgatttcatcgaaaaagaaccccttgctaaaatcgattatgtcgaatttgttgactggaaaacacttgaacctgtcagccaagttgaccgaccagttctcaacgctatcgctgtttatattggcaaaacacgcttaattgacaatcatatttacgaataagggaggctaattgtgcacattcaaatgttaaaatcaaaaatccaccgtgctgttgtcacaggtgccgaagtcgattacgttggcagtatcaccgttgacccagaacttttcgaagcagctggcatggttgaatacgaaaaagttcaaattgcagacgtggaaacaggcagccgactagaaacatacatcattgctggcgaacctggaaaaggagaaatttgcctcaacggcgctgccgctaagctcgtcaacgttggtgaccacgtcatcatcatgtcttatgctagcctcacaccagaagaagccaaaacacaaaaaccacttgtcgtctttgttaacgagaaaaatcaactcacacgcctaacacattacgaaaaagcaggtcgcttatacgaccaagaagctgaaaaatagggaaaaaaacagtccagcgga

SEQ ID NO: 216 - DNA, 52834 bp, Streptococcus gallolyticus
  source 1..52834: mol_type = genomic DNA
tccgctggacttaattcgcttttcaatttctaggctcatgaaaaaacagtccgctggactgtttttttccttatttttcgtcgagtcgttggtacaatgtgatcatttccaccgcaacttctttcaaagtcattgtagtcatcaaatgatcttgtgcgtgaaccataataatctcgattttaacttcggtaccgcttgcatatttctgtaacaaatcagtttgagcatgatgtgcttccaaaagttctgcatcagcagcatctagtttttcttttgcttcgtcatatttgccttctttcattgcagcaaatgcttcgtgaacagaagtgcgggcgttaccgctgtgcaagataatttcaaaagcagcaagttgcaattcttcttcagtcatccctaacaatacctcattaaatgttttctacgataagattagccattttctcaacacccattgggattggaacataagcttgtggtggaactttaacaactggacgacctgatttttcaccagcagctgcaaattggttatagtacataccagcttgtggactaactagatacaaatcgtaagttgcgtcagtaataacttgttcaccttcgttagagctgatagcttctacagtgatgtctttaccttggtttttgaaaaagtctgttgttttttgggccattagtgatgatgacattccagctacacagataatcaatgcttttgacatagtcattctcccttttagaatagaatataaaatagttgtttaagatgttttacgctccccaacatctttactaaaagtatatcacagactttttaaaatgtctagtcttttctttttaaaagtgtaaactttttcaaaaaatttaaacgctttctaaatcatctaaattgcagagctaaattcttgtttataaccatatattgtgttacattattctaagcaataccatatatagtagggaatttattatgtcacaagaaaaaaggttagctccgttaagcattgtttatatcagtttaagcggtaacacacaaagctttgtaaagcgcttaactgaacacttactgaaccattattcactagatacacagaccattaatatcaaggaactcaatcatgaaacatttccaatcacgacaccttttgttgctgttttgccaacctatcttgaaggtggtaatggtatcgattcaggtgatgttgaaatcttgacgaatccgctaggtgattttattgctgctcatgacaactacaaacattgttttggtattattggttctggcaatcgtaatttcaacgaacagtattgcctgacagccaaacagtacgccaaacgttttggttttccgatattgggtgattttgaattacgaggaacaagtgctgatattgagcgcctagcaaagattattgtgaagcaacaccaaggatttgccaatcctagttaatacatacagtcctctctcaactaaatttagcagacatggtataatagcatagatgatatcgtgtattttatcgtcgatatgactactaaattttaattggagaactcatgaaaactacggttgattatattacaaaacttgcaaatatcccttcacctactggctacacaagtcacattatgaattatgtgattgctgaacttgaaagctttggctatgcgcctgctcgcacgaataaaggcggtgttatggtcacagtcacaggtaaagatgacagcaaacaccgtgtggtgactgctcatctggatacacttggtgctatggttcgcgctgtcaaacctgatggacggctcaaaatggaccttatcggtggctttgtttacaacgctattgagggagaaaattgtaccgttcacgtttctaaaaatggcaagaaaatcagtggtacaatccttatgcaccaaacatctgtacacgtttataaagatgctggtacggctgagcgcaaccaaactaacatggaagttcgccttgatgaaaaagtgacaaatgagaaagaaacacgcgctcttggtatcgaagttggtgactttatctcatttgacccgcgtgttgtcgttaccgaatcaggttttatcaaatcacgtcacttagatgacaaagtgtcagcagccatcttaattgaattgcttaaagaatatgaagcgcaaaacattactttgccatacacgacacacttctacttctcagcatttgaagaacttggtcatggagcgaattcgagtatcccggttgaaactgttgaatacctttcggtcgatatgggagcaatgggagacgaccaacaaacagatgaatacagtgtgtcaatctgtgtcaaagacggttcaggaccttatcactatgaattgcgccaacatcttgtcaaattagcaaatgacaataagattccttacaaattggacatttatccgtattatggtagtgatgcttctgctgctcttcgtgcaggtgctgaagtcaaacatgccctttttggagctggtatcgaatcaagtcactcatacgaacgcacacacattgactctgtccaagcaacagaacgcctcgttgatgcttacctaaaaagcccaattgtggagtaagcaattgaatacaaaaaataagagtgaatgttatgttcactcttttatcgttctctattcagatataaccctaagttcgtgacctttgtgatcattttcgtctaggacaatgttttctcgcctgtactgtttccttaccaatttcaaagcttcgttttcatctcttgccttaacttttacaattctttgagcacttcactttctcaatttctacattgaatgtcctcatattttctccgtaattaatcatttattattttaatgctattattgcggatccattataacacataacacctaaaatcgcccctgaaatcaggagcgattgtgtaaaaacaaacaaataattaggaggtaaggttagttagtagttaagttcaacggcaagaccgaaatggtcactgacgattggcgcttcgccgccgtcaaatgtgacggttgatgatagaatatcaatatctttacttgtgaaaacatggtcaactttgagggattgtttgttcccctcccagccgtcaatgtcttcaataatcgtgtggtcgccttggactttcttagccactttgtggctgtcttgtaaatcaagtgggctgtttaaaatcatatcatagccagcagtatccgttgggttgttaaaatcacccatgagtaccaatggtttggggtaatcaagcagggctgtctccagcttttgccattcactttcaaagcctttaccaaaccaagacatgtgtaagctgacaaccgtaattggtttctgatcaatttctgtctccgcaacgagaacacgtcttgtgtgaaaatcagtttcgtcatcaacatcagataccagaatatcattcactttgataggtgtttttgatagaataacaacaccctcattgtacttttcgtatccaatatgattatatgcccaagaccaataataatatcgtccttgacttctcagataattcactagttgcaaagcataattatcacgatgcaaagctggacttccagggagtttttcatacccttcaacttcttttgtttctagtcctcggatgtcttgattaatttcttgaaggcaaatgacgtcataatcttcactataaatcgtttctgccaaatcaaataattttttcaatgcattggcttctaaccatgaatgcgtattaagtgttaaaaatttagccatatctgttcccttcaagtcaaaggagagtccgtgattcctatctcagactcccttttatttagatttaacctaaacatctcttattcatatgagtaatatcagcttaaagttctactttggcaacaggtgtgttagcagaaacttttcctgtttgtgttaaattgactgctttgatttctgctgtatttgtgaaggcaacaataattgttgtttcacgacctgctgaacgaatagctgctaaatcagctaccaccaaaagctcaccagcttgaacacgttgaccttctgtaatcttaactgagaatggtactccgttaagagcaacagtatctaaaccaatgtgaacaagaacttcaagtccattgtctgttaatagaccaaaggcgtgttttgttggaaagacgcttgttacaatacctgaaactggtgcgtaaacattgccattttctggttcaacagcgaagccatcacccatcattttaccagcaaagacagggtctttaacttctgtgataggttttacatcaccgtccgcaactgcattgacatcttctgtcacacctttataagaaacttttgtaacatcatttccttcaacttctgacaagttgacagttggaatttctgcgccagaatcaagaaggtcttgaatatcagatttcaaaatatctgcttttggtccataaaccgcttgaacacctgagcctttgataataagtcccatagcgccagcttttttccaagtgtcctcatcaccgactttagcgacatctttgactgtgacacgaagtcgagtcatacaagcatcaacatcttcgatgttatcgcgtccaccaaggagattaatgatttgaacgatttgtgagtctgcagagacactagcaccgtctgctgatgcactagcttggtcatcatccatatcgtcataattaccattacgacctggagtagcaaagttgaatttcttaatcatgaagtctgcgataaagtacatcacaacccctgacaagatacaacagatgacaaagttaatcaaatcaccgccaagtccagctttgagagccataggcgtacgtgttaaaagttcaatattaccaaatgaatggagacgaaggttaactaaatcagctaaagcaaatgtcaccccttgaacgactgcataaacaacgtaaagtggcattgcaacgaacataaacatgtattcgattggttcagtaacacctgttaagaatgttgctgctgctgttgagatgaacatagcagtgtattttttcttcttgtcagggtcaacattacggtacatagcaagactaagtcccataagtgtaccagttgcaccaatcatttgcccaactttaaagcgagctggtgttacatttgttaaaagatcttggtatgctgaagcattagaacctttaagattgataaggtctgttacccatgctaaccagagtgggtcttgaccaaagacttctgttcctttttgagcacctgtcaaaatttcataagtaccaccaagtgatgtgtagttcattgggatagtaatcatgtggtgaagtccaaatggaagaagcaaacgttccaaagtaccatataagaatggtgctaaaaatggtgctgaatcttgtgaagatgcaatccacataccaaatccattgattcctgattggatgattggccaaacaagtgacatgaacaaaccaacaagaactgaacgatagataacaacgaatggtacgaaacgtttaccattaaagaacgaaagaacgtctggtaatttgcggtagttatagtatttattgtaagctgttgccccaacaaaaccagagataataccgacaaacacacccatattaagggcaggttgaccaagaacattgacaaagtagtcagctacaagcatttcaccaccaagcacattgtgaaccgtacttgtaccatcggcaatcatatcaagtgaaatgccataaacgtgacctgtgataaggttgatgagaataaatgcaatacctgctgcaaacgcaccaccagcacgttcttttgcccaactaccaccaattgctaacgcgaagaggatatgaaggttattgataattccccatccgatttgagcaataacattaccaaccgtagcaagaagggctgagtctgcattgattagcggaagtgagttcccaatactaaccattaaacctgctgctggcataacagcaataacaaccatcaagcattttccgaatttttgccaaaattcgaagctggttaaatttttaaatgccttcttcatgaaatactccttaaaccattttctaggaaaccaattgctttaatttatgaaaaataatgccacttctatttttcaactcctttaaagtattggtttgagctttgttttaaatttacgcaaacgtttgcgttgttttgatgattttattataacacgtatttttaatttgtaaagcgttttccgtaatttttttaaaaaaagacatctaaacaaacacttccttggcaaaaaaacctccaacggaggttttagttagtaaaaactgttaacccaaatctggtgttgattcgcgttcaatgattttatgtggaataacaaccgtttgttcagttaaatttttagggtcagctaataataatttggcggcattctcccccaactcatatggaaaaatatccacggaagtcaaggcagggctcgcaatttctgtaatcaatgaattgttaaaaccaatcatggcataatgattttcaaggtcactatccttaaataaacgttgcaaacgaatcgccatgatgtcatcacaggcaacaaaagcttctgttttgggattttcagcaagaaatgtctgcaacttcatcgcattttcctcgtcgcttaggcgtgataattgcaatgtactcccttttttaccgtattcttgcaaggcttcacagtaaccttgataacgttcggtttgcactaattcatccatatcagtataggcaaaaacaagatgattatagcctttggctaacatgaatgtcgttgcatctttaccagcttggtcattattattatcaacaaaacgcaccattttttgcggagcatcttcgtaagaacgaccaacgacgacacaagaaaccttcttttcttgtttgacaaattcaaaaactggatctgcttttcttgaataaagaaaaataagcttagtgatgttgccgctacgaattaaagtttggatatttttttgcaattcgtcatctgttcgtcctgttgccaagctgaccatgtagtcattctcgctacatacgcttgaaataccttgaataatttgcatgaaaaatgggttatttccaagtgaatcctgactttctcgcacgggcaaaataatccctattgtattggttgtgcgattgactagattttgtgccgaatagtttggagagtaatccagttctttcatcgcacgacgcacacgtcttttagtcgcctcgctaatcatactactatcatgcagagcacgtgaagctgtcgaagttgatacccccgcaacccttgcgacatccttaattgttgccattatattatccttatctgtaatttgtatatatctagaataaaaactttttaaagcgctgtcaacccaaaaccttcacaagcaccagtaaaaaataagtaaataaaaagaaaacacctataacagtgttttccattataaattgttaacaacctaggtttctagctacttcatcaattccaaggcatagctaatgctcgctaaagcgtatagcggtgcggtttcagcgcgcatgatacgtggccctaaaccgattttcaaaccaccttttgattcaaatgtttcgatttcttctggcgaaatgccgccttctggtccaaagataaagagaattttctctcctgctttcatttgtgacaattcacgcgctagaacagccgtctcaccttccttggctgattcctcataagcaataaaaatcctgtcaaattgctcaagttctgctaaaaaagctgcttttttctcaaaaagagtgacttctggaatgctattgcgtttgctttgttccgcagcacctagtgtgatttttgccagcttatcagcttttttggctaattttttgccgtcccatttgaccactgaccaatccgctggaaatgcccagagctttgccataccaagttcagtccctttttgtgctagaaattccaatttatcaccctttggaaatcctgcggcaatcgtcacctcaacaggcaattcaacattgctatctagttcttcaatgatttcaaaacagtgttcagcactatcaatgacttttgccaaacgcttcacgtggtcatcaaagacaaggacaacttcgtcgttttctgtcaaacgcatgacgttaaacatatgcttaatcgtatctttatctgtgattgtaacgacatcttgagcttgtcctgctacaaaatactgttgcatttatcctccaattacacctgaaatatcatctgtttttttgaaaacacaagcattccattcgccttgaaccatgtgtgtttcaaggaagaaacctgcgtcctcagctgacttacgaaccatatcccatttatcagaaataatgcctgacatgataaggtaaccttcatctttgacaagacgataagcatcttctgtcatattgaccaaaatgtccgcaaggatatttgccacaataacgtctgcttgaatgccaacaccttgcaaaagatttccagtagccacatggatattttcagtattagcattcaaatcaatattttcttgtgccacgcgcaccgctacttcgtcaaggtcataagcgtaaatgtcttttgccccaagtagtgaacttgcaatcgaaagcacacctgaaccagtaccgacatcaaggaccgtttcaccgccacgaagcacttgctcgagcgcaaaaagactcatttttgtggttgggtgagttcctgtaccaaatgccataccagggtcgagacgaattgttttctcaccctcactagcttcataatctgtccaacttggaacgattgtcaaatcatggctgatacgcgttggttcataatattttttccagttctctgcccaatcttgctctgccaattcttgcgttgcgtagtgaacatcaccagcatcaacgccaaaatcagtcaattccgctaagcggtcagccacctctttttcaacagcctcaatatcaacgttttctgggtagtaagctgtgattttaacagtttccacttgtttgatttctggaaatacttcgccgtatttgccaacatgaccgagatagtccgcactatcatcaatcgccacaccttgactacctaattcaatcaaaatattcgatgcagcttcttctgcatcacgtaaaacctcaacagttaactcttgccatgagttcatttatttcctcctttagattcacttgtaagttatacttatcattgctttagttattaatagttttagtcatgtaaaccatatccataccttcttgctctgactcagtatgggtttgatggtaaccacatttttcataaaattttaccaaagactcttcttgaaaaaccgtgcacaaatcccactgggtaacggttgaaaattcttcttcaagtaaataaacgcctttagaaccatagccttttcgctggtattccggtaatatagctgccgttcctagccaagccttggtttgtccatcattggtgagtacccgaagaaaaccaataatctcatcgtcctttttgacgaaataataaaaactattaggacgttccaccaacttccacctaatgcgctcctcatcttccacatagggatcatattcatcatgatatttatcataaattgccttaaagctagcacgttgaatactgataatagcttctaaatcctttgcttgtgcttgttcaagtctaatcatcttttatcctccaaataattccttaaacctcaacaccaatttaatgaacttcaagtcattgtatgggagctatcactcccaaatctatacgaactacaccatacttttttgttttacttggtaaaattatcaaatatataactagacctcattatttcaaaggctttggagacaataatatttcatgaatttcctcaatacctcggataggcaaagtattctgtttctttcagttctgctttgccattttcaaagctttcagcgtcccattcgagcgcaaagtcagtcgcattttcgtctgctaaaaagtccattaaatcatcaagacctttggttgctacgtcgttcaatgtttcagcaaaataggctaaaaattcacgcgagaagccttttttggcgtcaaatggaatagtcaccaaataatcattttcatcaacttttgattttgcttgattgtaaaaaagcacataatcttcaaaaatgatgtcatcattgctgatttcaccttggtcatccacagtttcaaccgcagattgattctgcgcttccaaaataaaagtcacttccaccgcatgatttttcttattccaatcaatggcataatcaaacgtgaagtgcttgtccatttcttcttctaatactgataaaaagccaaatttagccattaaaaatttcttccaatcttcttttgtgttacaattattttatcatacttaaggggaaatgacatgcaaatacgaccaatggagctagaagatattgaacaagtggttatactagaaaaccaaacatgggatacatttaacacgccagctccgctacctattgcaaataaggataaaatcatcaaagattttgaaaatggaacacattatcttgtcgctgaagaaaatcaggacattttaggtgttcttgattaccatacttattatcctttccctagcggtcatcacgtggtaacttttggcattgccgtttctgaaaaaacgcgcggtcaaggtatcggacgcaaacttatccaaactttcttcgatatggcaaaagctgacggctaccaaaaagttctcattcatgtgctatcatcaaatgaaaaagcctgcacattctacgaaaaattaggctttaaacaagaggctattttgaaaaatcaattttacctaaaccatacttacgttgatgacctcgtttacagttattatctggaggatatccatgccaaataatctcgctttgcgaatgcgccctaagaatattaaccaagtgattgggcagaaacatctagtcggtgaaggaaaaatcattcgccgtatggtggaagccaatatgctgtcatcaatgattctctacggtcctcctggtatcgggaagacctcaatcgctagcgctatcgcaggaacaaccaaatacgcttttcggacgttcaacgctacaacagacagcaaaaagtgcctgcaagaaattgccgaggaagctaaattttctggcggtttagtcttgctgctcgacgaaattcaccgcttagataaaaccaagcaagatttcttgctacctttacttgaaaatggcaatattatcatgattggggcaacaactgaaaatcctttcttttcggtgacgccagccattcgctcaagggtacaaatttttgaattagaacctttgtcaactgatgacataaagacagctttgcaaacagctttatctgataaagagcgcggatttgactttgatgttgatattgatgccgatgcgcttgatttcattgcaacggcaaccaacggcgacctacgctcagcttttaattcgcttgatttagcggtcatgtcaaccaaagcagatgataacgggctgcgccacattagccttgacaccgttgaaaatagcttgcagcgcagttatattaccatggataaagatggtgatggtcactatgatgtgctgtcagctttgcaaaaatccattcgtggctctgatgtcaatgctagtctgcactacgctgctcgtctgattgaagctggtgatttgccaagccttgctcgcaggctgactgtgattgcttacgaggatattgggcttgctaatcctgacgctcaaattcatacggttacggcactcgatgctgcccaaagaattggttttcctgaagcacgtatcttaattgcaaacgtcgtaattgaccttgccttatcaccaaaatcaaattctgccattacagcgattgacaaggctatcagcgaccttcatcaaaacggaaatctgccaattccacgtcatctacgcgacggacattacgctggcagcaaagaattgggcaacgcacaaggctacaaataccctcatgattatcctgaaaaatgggttaaacagcagtatttaccagataagttagtcggaaaaaattattttgatgctaaccaaactggaaaatacgagcgtgccctcggtgctaacaaagagcgaattgatgaactgtctaaataacaataatatattgactttctcattttaatagcttttgttaatgcctaaaaagaaaaccgctttctaaaaaataagatttgcccttgaaatattttttaaaaatgctatcatagatacataggttattgctgtggcatacgaattcacatcaatgtgttgaccgactaaatatttgtatttcgggaaacagtagtctttctccagtatgcaagccgttacacgcggaagcaactaaggagaagcgagttgcccacctgcttgtagatcgcgggttcaatacaaatcgtgaatcacggtgccaatacagcttcttatccttccttagctcagttggtagagcagtggactcttaatccatgggtcataggttcgagccctatagggaggactaaacatcataagaaaaagccctttgtttagggctttttgtttgttctaaaatcgatttgttgcgaaatttgttgcgattttgtcataattttttgacgacctgctggtcgtctctgcaaatgaaataaataatattacttttcagaaataatatttgtgataaaatcaatggattctattttggctatttcatttgcttttcctgtaaaaccatgacccgctccatcaatgaccacaagtctagcattcggaaatgtcgtcaccgcacgttctgaataactaattgggacaatattgtctgatgtgccatggataatcaatgtttttccgtgatattgcggcattatgtcataaatatcaaaagactgtgcatcaatatcataaatttttccaacttctattcccataatacgacttgtctctggtcctaactctgggttaggatttcttttcttgctatcgtcttgtagcacataggcaggatataagacaattaacccagcaatatcatctggtcttgttcccgctacataggttgacacaaagcctccctgacttgctccaaacaagaaaatttgttgattattaatgcccgaaaaatcttgaaaataatccaagacaacttcgaggtctgctgcttcagtcaatactgacatttcagtcttttttccgtcgcttcgacttccgaaaccaccaccattaaaatcaaagacataggcagcaacgccattgtcaacaaaataatgagcatagccctctacgcttttataattggcgccaaaaccatgcgacaaaatcaccaacggcggattatcaacgttttcaggcagatacaatttcccatataggtgttttccatctcgttccatataaagaccacctttcttagtttacgaaagcgcttttgtttattgcctattatagcactccaaaccatttttaccaaaaatatgacacgctaaattttccaaaaacagaatgacgctttatcgcctaacaactgataaaaatgggaacttttgctaaaatatagaaaaatgctatggaggctaatcacttggacactctcattatctacgcacatccttatgataaaagctttaatcacgctattctcaaaaaggtaaaggattccttaactcaaagaggacaagaatttcagacgattgacttgtataaagataattttaacccagcctatacaacagaagagttggctttgtttaaggagggaaaaacgactgacccgctcgtcgctcaatatcaaaaatctctaactgtcgccaacgaagttatctttattttcccaatttggtggaatgatacgcctgctatcatcaaaggttttattgataaggtgatgaaaaagagatttgcttacgacgttggcaaaactggcttgattggacatttaacacatatcaaaaaagcgaccgttttaaccacttctacatcaccaacttggtatttaaaactcttttgtggcaatgctatcaagcgtgtatttatcaacgccactttaaaacaattaggcattaaaaccgtcaactggcttaatatgggaaacattgacaatagcaccactcaacaacgccaaaattttcttgaacgtattagtctttagaagacaaaaacgaccaaatctctggtcgtctttttatttcaaaaattaaaaatgtcgttaaatacgatattgtgttaaatcttgttttaaaaagtagtaaaataagttgccataatttcctgaataatccagtacatgaccgttataaacgaccttagtgactttgtaatagtcgtcaatatcgattgagcaagcttgctgtgaacgttcgaattcctcgtatgagtcaaacgtcaccactcgttcttggtttcctgcgtttaaaaatgtaatttcaatcattatttacatttcctttctaattcgtcatactatattacttcgatgttggaatacagtatgtagaattgtataacgctatgctactacaaagtgtgttttcacacaactattttgctctgactggattttctcaatcataatgcaagaatcaattgtaaattataaaaagagattccaaacagaaatctcttttttactgaatttgtaaaacgatattattctttatgatactcaaaagcaattgtgtagcttttctcctcatttgcttgcagggtaatgtcaccaaaattatcatgattaatagcatctgggagaaattgtgcttcaagcgctaaggcttcaaattctttagccattttgcccttatcacgcgctggataaataccttcaggaatgccacccatgctgtaaacgacccaagcatcacggtcagaataaaggtgaacagaatcgccactttcctcatctttcaattctccacaaggtttatcaagcgaagcatttaccaagaaagcatcgtcaagcccgcctgtatcagcgatagcctctccaaggttttgcccagtttgaaaatcataagctgtgccagcaacgtcaatgaattttcctgtcggaatcaaatcatcacgagtctccaaataacggtcagctgccaaagtgaaggtatgctgacttaaatcttgacgatttcccaagttaaaataaacatggttagttgggttaaaaagcgttgttttagtagcttttttgcccgtataaacaatcgtaaaacgatttgcattgtctagcgtaaatcgtacttctacctgcatatctcctgggaaatggtcaatttcctctttagcgtcataagtcatcaccacactaagcgcattttgaccagcttcgataaatgcagtccagatttgctgatgaaatccttgagagccaccgtgaagagtgtttcctttttcgttttgtggtagctgaatttctttgccatcaaggttaactttcccttgattaatacgccctgcaacacgtccgattgattgacctgcacataaaggatttttcagataatcacttggcttatcaaaaccaatgataagatttttctgaccacctttgtcgtctggcactaaaaattcttgccaagttgctcccagcgttagtaaaccaacttggacaccattatcattaacaatagtgtatttttcaaccttttgcccattaattgtctcaacaatttcttgtttgacttccattttttaccctctttcttaggttctttcttttattttaccttttagataattttttgtaaacgtttactatgaggttttaccaagttttaccagacatcatctccataaaccaaaaactcctgcccattggacaggagttcaaggttatatgtagtgattattttaccacgatattcaagtttgttaggcactgctcaaaagctctgggagagggtttgaggttgggaataaagctaacaaacttgtatcaaaaatctatttcacaacaatatttacaagtttgttaggcactgcaatcactttaataatgtctttaccagcgatttctgtttggattttgtcgttagcaagggcaagtttttcaagttcttcacggcttgaatcttttggtacaacgagtttagcacgtactttacctttgatttggataacaatttcaacgtcgttttcaacgagttttgcttcgtcccatgttggccatgcaacatatgaaattgattcgcctgattgtgtcaatgtttgccacaattcttcagaaaggtgtggtgcaaatggtgctaacaattgtacaaagcctttagcgtagtcagcaaagagtttgtcctctttgttagcagcgttgacgaataccattaattgcgcaatagctgtgttgaatttcatggcttcaagttgttcagttacagctttgactgtttcgttgtagactttatccaaattgccattattttctgcaacaatttcttttgttgtcaacaagcgatagacgcggtcgaggaatttacgtgagccttcaagaccttcttcagaccatgcgattgaggcatcaagtggtcccatgaacatttcgtacacgcgaagtgtatctgcaccataatgttcaaccacatcatcagggttaacaacgtttttaagtgatttagacattttcgctggtgcttgttcaagttcttcaccagtttcaatgtggaagaatgaaccgtcacgtttttcaactttgtcagttgccacaagcgcaccacggtgatcgcggtagcttgttcccaaaatcatcccttggttaaagagtttttggaatggttctttggttggaacgacacctaaatcataaaggaatttatgccagaaacgagcataaagaaggtgaagcacagcgtgttctgcaccaccgatgtaaatatcaactggcaaccattgtttcaacaattcttcatcagctaatttttcatcgttgtgtgggtcaatatagcgtaggaagtaccagcttgaaccagcccattgtggcattgtgttcgtttcgcggcgacctttaacgccgtcttcgcgtgtcacttcaagccaatctgtcaagttagctagtggtgattcacctgtacctgaaggtttgatgtctttggttactggcaatacaagtggtaattgctcctctggaacagctgttgttgtaccgtcttcccaatggatgattgggattggttcaccccaataacgttgacgtgagaagagccagtcacgcaagcggtaagtcactttcttgttaccaacgccttctgcttcaagccattcaaccattttgtcaatagcttgcgctttatcaagaccgtctaggaaaccagaattgatgtgaagtccgtcttctgtgtaagcttcttcttcaacatttccgccttcaagaactggaatgatttccaaatcgaattgttttgcgaattcccagtcacgtgtgtcatgggcaggaaccgccatgatagcaccagttccgtagcttacaagaacataatcagcaatccagattggcatttctttaccatttactgggttaatggcatagctaccagtccaaacacctgttttttctttagcaaggtctgtacgagcaaggtcagatttaaggcttgcttggtgtttgtagtcagcaactgcttgcgcttgttctggtgttgtaatagcttcaacaagtgggtgctcaggcgctaaaacagcgtaagtcgagccaaataatgtatctggacgagttgtaaatacggtgaaatctttatccgtatctttgattttaaaagtaacgttagcaccagttgatttaccaatccagttacgttgcatatctttgattgattctggccaatcaaggtcttctaaatcttcgagcagacgttcagcgtaagctgtgattttaagcatccattggcgcattggtttacgaacaactggataaccaccacgttcagatgttccgtcaggcagcacttcttcgttggcgatagctgtccctaattcttcaacccagtttactggcacttcagcttcgtacgccaagcctttttcgtataattttgtgaaaatccactgagtccatttgtaataattagggtcagttgtgttcacctcacgatcccagtcatatgagaaaccaagtgagttgatttggcgtttgaagtttgcaatgttttgagctgtaaattcagctggatcattacctgtatccattgcgtattgttcggcaggaagtccgaaagcatcccaacccattgggtgaagaacgttgtagccttgagcacgtttgaaacggctaagaatatcagtcgcagtgtatccttctggatgtcctacgtgcagaccagctccagatgggtaagggaacatatccaacgcataaaaatttggtttatcagcgtctgttcctgttttaaacgtatgattatcagcccaataggcctgccattttttctcaatttctttatgattataagttgccatgtcattctccatgttcttagtgttggttactattataccacgaaaagaataaagaaaaaaggcgaaatcacaagggatttcatgcctgttttcagttgataagaataatttttagtcaaatcaaatgctcatttagtcattggctaaataatctttcaattgttccatgattgctttggtatctttgacaccgatttggtaaatttcttcgtatttgtcagggttggtttcaagtcgtccgatttccaaattttggctggggcgaatggcaaaaagttcgcctttattttccaaattgctaatgtgttcaatggtgttgttatagtgttgataacgttttgaagcgacctctacaaacttagggtattttctgtaaaaaagtttatagacatgaccattacttggctttttacggtaatcaattggacgtgttaaaacaacaatcaatttatcaaaaccaaggcttttggcaaaatcgactggaatactgtctgacagaccaccatcaaggtatttattactttgccactcaacgatttttgatgccaaaggcaatgcggaactcgcacgaagcaactccatttgttcaaaaacattgtcaaccttatgatactcagcttttcctgttgctaaattcgttaccgttgcatagaaaggcacacctgatttttcaaaagcttcctcgtcaaaaacatccaattccatcggaactttgtaataggcaaattctttattgaccacatttcccgtttttaaccatgaacgaagtcccatgtatcctggatttgaggcatattttttattataacggagggctctgcctttttgttttgacaaaaaattcaccccaaaaagagcgccagcagacaccgagacaacaccgtccaccttaattcccgcatctaaaaaggtatccaagacaccagcggtgtacaagccgcgcatgccgccaccttctaatactaaaccaacagacatcctcattctccgttctttctcgttttgttacttattataccaaaaaacatgctatttagagtgtttttgctatgttataatagtcctaacaacatcagggagacattcatgagaaaacagctttttaatattatcgaaccttctgataacctaacaaccgttgaaaaaatttacgatgtttttatggtttgtgctatcgtggttagcttattgccactgacaagtaagacaacgacgtcattttatatcacgcttgatgctatcacaacgattatttttattatcgactactttttgcgttttataaccgccgattataagctaaatcaaggaaaattatcctttgtcaaataccctttcactttccttgctattactgacttaattgccattttatcctctgtccttttttggaataatacctttaaactgttgaaaatcattcgcatggttcgcaccattcgtgtatttaaactttttcgttattccaaaagccttaatctgctgataaatgttctcaaaagacaaaaggaatcactatttattgttggtgccttggttattacctacatttttatctcggctctggttattttcaatgttgaaccagatacctttaaaaacttttttgatgcgctttattggtcaaccatttctttgacaacggtaggttacggtgatatttatgccgtttctgaaattggaaaattaatcacaatgatttcttctatcctcggcgttgctatcattgcactccctgtcagcatcatgactgcaggctacctcgaagaaatcgaaaaagaagataccgaatcaaaatagcattcaaatacaaaaaacgctgaattcagtctaagagttcagcgttttagaatgtaagccaatatacacgttaagcttgtgaaaaatcattacaattcagcgatttggtaaagctccaattcagcttgtgtttcagttccgaacatgttaatcatcaatttcactttgttgttttcaatttcaacaacacgtccttcttgtcctgcaaaggcgccgtcgatgatttgaaccacatcacctggtttgatatttgtgtcaatgacatcaacagtttgtcccattgagataagaattgaacggatttcttcttccaaaagtggtgttggttttgaacggttaccgtgtgacccaacgaatccagtaacgtttggtgtgttacgaacaacaaaccaagcttcgtctgtcatcaccatttcaactaagacataacctgggaaacgattttcttcaacttctttgactttcccatttttttcaacattaactgtttgtgttggaatttcaacgcgcaagatgttatctaacatattgtaagtttgcgcacgttgcaacaatgtttctttaactttgttttcgtaaccagagtaagtttgtaaaacgaaccaacccttatcaaatgaatctaacataatttcctccattataaaaaagccccgcaaggctctttgggtgtttttctttattttattataggaaaaataataagcgctgtcaacgaattgctgccaaatgtgcacaaaaaagcctgagaaaggacttctcagacttcttttgacttaatcaatcagaagcttgctattgcaaaacctccaatcaaacttaatcttaaaaacgattaaataaatctgtcactccgagtgagagcaatttatcgaaaatgaaaataacaatggtaaagaatgctgtatattcaagtacagaaataaaatctttccaacgttgtttacgatttggccatgttgtgtcttttaaaatcgtaaaaactcccttaatgaatgccacgggcgcctcctttttctatcatctccgctcattactctaaagctgagaatgccagttactacataaaatgattaacgtgtttctttatgtagtgtgtattttttacaatatttacaaaatttattaacttctagtcgtacaggctttggattactactaactccgatagagtagttacggcttccacattctgtacaagctaaacttgcttttttctgtgccataatgcctccgagaccttattttatcatgtttttgataagttggcaagttcattagttcgtctggctgttaaaccaacttgagaagctatcccaagcgtctttaaccgctcgtccaatcgtatcgccagcgttttgtgcggattcttgcactttatcaaggatactgtcagagcttgatgacgaactgctactgcttgtatctgttgaatcatcggtgctataaactaaatcgtatccattctggctataagcattttcgacggtaaactctgttcctgccgtatatggtaaaatgctacttgctaccgcactaaaaatggttgatgccgttcccgaacttgcgtcggttaggtagtgattttcatcagtcgaatcataaccaatccattgagcaataacaacatcaggcgtatagccaattacccattggtcacttgtcaagtcttcattgaagcttgcttctacggtacctgtcttacctgccatcgtgtagccataagcattagcgttaatagcagagccgtttgagaatgttccgagcatcatgcttgtcatcttatctgcgacggattggctaatgacacgtttattggattgtttaaattctgcaatcacatcaccgctagcattttcgattttggtaatcaaatgagcttttggcatcacaccaccattagcaaaggttgaataggcttgcgccatttcaagtggattcgttgtgacaccaccaccgagtgcaatacccaattcctcgctgacattgtccatgttgagaccaaatttcttaccgtagctaattcccttactgataccaatttcatttaagagataaacggcagggatattataagaattagctaaggcttgatacattggcaaatcatctgtctcaatgccaccatagtttgttggtgcatagccatcgtagtcttgaaccgtatttggcaattcagttgtaattgaataacctgaggcaaccgctggtgaataaaccaccagaggtttgatggttgaaccagggctacgtgatgcttgtgtcgcatagttgaaacttcggaaggttgcagaggttgagctaacacgccctaccagaccacgaacagcccccgttgatgggtccatagcaacacttgctccttgggcactttcaccgtcataatctgatgttgggaagtaagacgtattatcaaaaacagcttgcatattggcttgataattttggtcaagctctgtgtagattttatagccattattgacaatatcatcttctgataagccatatgtttcttcagcttcctgaataaccgcatcaaaataagaagcgtattggtaatcgtcagaagttcctgtgtaggtatcattaagctcgctggaaatatcaacttgctcagcttcatcagcctcttcctgcgtgattttaccagcatcaaccataacacttaggaccgtattacgacgatttgtcgcattttcaatagaataataaggattgtaaatttcaggacctttcaacatcccagcaagaatcgctgattgttcaatggttaaatttgctgcgctggtgccaaaatatttttgacttgcgtcctcaattccccagaccgaatttccaaaataagcattgttcagatacatggtcaagatttcatctttggtgtattttttggttaactcgagcgcgaggaagaattccttagcttttcgggtgattgtctgttcttgactcagataagcatttttagctaattgctgggtgattgtcgaaccaccaccaaagtgcccaaaggtgaacagagccaagaaaaaacgtgaataattaatcccgctattttcatagaaagttctgtcctcggttgcaataaccgcatttttcatgttatcactgatagcgtctaattcaacatacgttcctttttgacctgaaagcgaaccgacttggtcaccattttggtcatagataacagttgttgctttcaaagcatcttgcaaatccgaaacattcgttgatttggcgacaaagtaaagataagaaccaatcgctaaaacaccaattcctgttaaaataagcagaatttttccaatacggtagcgacgccagaaacgtcggattggatttttggtggagggcatgaagcgagagattttttgcacccaagcaggcgattttttcaccttttcgtggtgtcctttgcttcgctgatacgttggtgttgcttctttttcttctgttttttctgtttcaaattcattgacagtagcgcctgataactcctcctcagatgagttacgcttactgtgattgcgagaaggtattctctccttgatgtcattaaacaaagaaagaattttttctttaatcatttttaattttgtcatagctacattatatcaatttcttttaaaatcgtcagagataaagggattccttaaataatacaacgttttcatttcattttagcctttttgtgataaaataaaagcatagaaaaacaggcacaactggtctcaaacagccactcattcccacaatacttctaccgagtattagaaaggatttcacgatgaacaaaggatttgaagcatttaaaaaaacattgtcacacgaaagtttaaaagccgtttatgatgaaacaaaaattgaagtttctgaaagtgaagccgaaggcacagaagcctattcaatggcagtcgcaactcaaatggcagttaatttgttggaaaaataccacgattggttgcacgaaaacgaccaaaaataaactatcagcgcaccgaacaaggtgcgttttaacttgtagtcatgctataatagagctatgactttatcatttacgcttaaaaatccttatccagactgcacggtcaaagaactcttagaagaacatttactcattccacgaaaaattcgccacttcttgcgcactaaaaaacatcttcgtatcaacggagaaatgattaattggcagagtttggtcaaaactggtgacacgattcatttaatttttgatgatgacgattatccccaaaaagagattccttttggacaagctgagctggttgattgtctttatcaagacgaacacctcatcatcgtcaacaaaccagaaggcatgaaaacccatggcaatgaacccaatgaaatcgctctgcttaaccacgtctctgcctatgtcggacaaacgtgctatgtgattcaccgtttagacatggaaactagcggagctgtcatgtttgccaaaaatccttttgtcttgccaatcctcaatcgcttgctagaaaacaaagacattgctcgcgaatactgggctttggtgcaaggaaaattcgaacccaaacaccaagtctttcaagataaaattgggcgcgaccgtcatgaccgtagaaagcgcgtggttgaccgcaaaaatgggcaaactgccttaaccatcgttgatcgcctcaaagtttttccaaatgggactctggttaaatgtcgcttaaagacgggacgcacgcatcagattcgtgtgcacttatcagctcacaaccatgccattattggcgacccactttatagcaaaagccctgccaaacgtcttatgctacacgcgcacaaattaagtttcacacacccatttacccttgaaaaaatcagcgttgaagccaaatctcaaacctttgaagcaggcttatcataaaaacaaaagcaccccaatcattagattttgtgtctaacttttggggtgccgttctttgtgcgctttttaatcgttaaacggaataattttctattttttcgtcaatgtattgccgtaaagtggtttactgtaatcaaaatcgtcatttgttccagtttgccaaaggactaatttcaaatgtgacccatcaattttaataccgaaggcatatttgacaccgataccgccaataccgctagtaataaaggctgatgtatcggtaccgtcatcgtaaacataacgataaatattgtccccctcttcttctagtttagtaactttcgctgttttgacttcgttatctttcgttgttttagtaatcgtaccgtcagcctcaaacttgaacgtcatgtcatccttatcatcaaccttccatgttcccaagattttttctgggaagactgaatctgattttacttgattattctcacctgtcacggtgatatttttttgcccagaattagccacaacatagcttgaacctgattttttcaaggtcatcttgccttccaaggtctgaataacatcaccagatgtatttttctcgctatctgttgatttatcataataaaaatcataagttgctgaaaagttaacaagataggactccttgccaatctgagatagactcgtcagcgtgatggttggcacagtcagacttgacgccttacgagtatctgtctgcattttcgccttaatgctctcttttaagcctttataaaactcattattcgctccatcttcaaataccgtagagacagttgatgaatcttgacccgtgcttaaatacgaaatcaattggtcaaaagctgacacaagaatctgaccagcgcttgcttcatctaagagattttcagcatctaaagccaccgtatcaccatcagaaatgcctgaaagagcctgcttttgtgatgtcaattctccgtctgaataattctttttaacataagcttgcgcagaatccgtcaaaggataatcactcacatcatactcaccatttgacaaagtcccaatgcgtgtgtcatcaaaataaagctcaccatcagtcaaattacttgttactttgaatgttttaaaactaacagtcaaatccaacaagctattctcaccgtcataagccttacttagctctactgacttcccattgtaagtgcctgaaatactcgccgtataatccgcaattggtaaacgctcaagtgttaacgtatagtcttccgaatcactaaccgctacttttttctcatttagaagaacatcaacttgattaatatttgtcttaatggttaaactcattggttttaaagctactcggtaagctgggaaaaagagaaatcttcgccccacttttttaatgtaggaatcatccgaactgcctgccttctctagcgtctctgacagtttttgggcttcacttttagaaagctttgtaaacgtcgtatattgcgcttggtcattcgtcacttgttgattagtatcagaccagacgacataccccttgatattttcaaacgtatcgccagactgacggtaagcagagacatattcctcaatcaaatgtttctttgaataatgaaaactcccccacaccaaaaatagtaccaaagcaagtcctaaaataagactaggtatccaaactttttttaatcttaaaatgctttttatctttttcatgacttttctccattattcttactatttcacatattatatcaaaagctctttaacctcttgttacaaaacagccacaccatattacagtaaaaaacagaaaaaacggctcaaaaagccgccattagtcaaaaatcatctttattatcaatcctaacaatataaatagcacccaaaaccgcaccagcaacgcctaaccaaaagaacataagcttacccccttcacctcaaaaactactacactcacgagtaaactgttattgttgcttttagtatactacaccttctattatttttcgaccattttaatgcttcttggaaaaattgacgcaaaagaaaaaacgaaccccaccaaatcaaaaagttcgttttttctttaagttttttagtgtagcttatcagtcttttcagaaggtaatcagtcatcaagctgcaccaacatattttcagctgcccccaaccgaaaatatggtgtcaaataaatataaggtctacgaggatgtctaggttagctatcagtgattttatatgtgaacaatcatgtctaaaacaaaccttataaaccgttcttaatgttgtcatacctcatggatatactaatttgtaattgagtaaataatactactacgaatactacagacggtgtcactcaattgaaaaaggtatgacttgttaacttgaactggtcattgttcaagtcttatttagcaattctgctaattttctcctaggaaggtccaattcccttagaacaatatcttggttttcgagtatgctcccaaaatcaaaagctcccaatcaattgattttcatacttgaaacttcttacatataagaacgacatggttccattaagcattaatcaaaatacttatggatataatataacatagaaaactgccgatattaaaaattcgcaaatatgaaaatttaaaaatatttttttcatatttgagaattttagctttttttcttaatttattctataatggatagaaaagggaggtaatgttatgctcaaaaaattgattgctgtagcagctgttcttctaacttttagaatttggccattttaattagtgccaactatttccgaacacggagagtagataacaattatccactattaggttagcggtggttgtttatctgctcttttcttgtcttttaggcaaaattcttctaaccgttctcttaacaccaaagcagttgtagggttacctagtttttctaccatttcaatatattcttccattggttcggtcgttgttatttcaccttttaaataagctagaatttgccttaagaaatttaaaacaacaatcgcaaacatatcttgataatttaataatttttccagtttatcaataaaaaaagtggtgtaataaaactcttcgcggtcaattagcgcaaagataatatttaaaaaggttagctctgctgtttttttatgctgcggcaatgataaataaaacttatcacgttctgcaaaagctttccctaagaaaatcaaatctgcatctgacaaaatagccattgtatttccaaaaatgtacagttcatactccgtccattcttctataccataaagatagtctgtcaaaaacttcttgtcctcatcggcgatttcataatttgggtctagtgaatgaatagcgctagcgacatctatcctatttagtcggttataggtgtcaaatgtttccgtatcttccaaagtgttcagcaattgttttaatccttcaacatcaccctttaactgtaattttgcaatctgtttaccaacagcaaaaaaggggctttcttgataatgatttaaagcgtgcccgaactcggcgaaactcatgtgaatcccagaaatagctactaacaatttatcagctgctaacattgtttgcccattttcaaattttgataattgtgaaagagacaaattgccacgtgccacatcttttaattttagcccacgcgccactctgagttcccgataaagttcacctaaattcattaattctttttcgttcaatatcattttctccataataatgagcgctagctcttttccgcgtcatctatactttttcttattatatcaaattttgttataaaactcttaaataaagacattgctttcaaggcaaatgaaaactcctcagaatttgaggagttttcgttatttttaataatcatttatctagcttagaagccacccatcattgatggatccatacctggagctgctggcgctggtgcagctggttctggatgattagccacaacggcttcagttgtcaaaataagacttgcaactgacgcggcattttgaagggctgaacgtgttactttaacagggtcaatgatacctgcttcaaccatgtttacccattcaccgttagcagcgttaaatcctgtaccaacttctgagtttttcaagtgttcgatgataactgaaccttcgtaaccagcattgaatgcaatttgacgaaccggttcttcaagagcacgaagaacaatgttacgacctgttgcttcatcaccgtcaagttcaagttcagcaacttttgaaatgacattgacaagtgctgtaccaccacctgcaacaataccttcttcaacggcagcgcgtgtggcattaagcgcatcttcaatacgcaatttcatttctttcaattctgtttctgtcgctgcaccaactttgataacagctactccaccagctaatttagccaaacgttcttgtaatttttcacggtcaaattctgatgttgttgcttcgagttgtgatttaatcacattgacacgattagcgatagctgaagcctcaccagctccttcaacaataactgtactatctttatcaacagttactttagcagcttgtccaagagctgtcatgttggcatctttcaaatcaagaccaaggtcttctgtgatgacagtaccaccagttaaaacggcaatatcttcaagcattgctttacgacggtcaccaaatccaggagccttaacagctacaacgttgaaagtaccacgaattttgttaagcacaagtgttggaagagcttcaccgtcaacatcatcagcaataataagaagtggacgactagttttaagcacttcttcaagaagtggcaaaatgtcttgaatgtttgagattttcttatctgtaatcaagatgtatggattttcaaggtcagcaaccattttttcattgtcagtaaccatgtattgtgaaaggtaaccacggtcaaattgcataccttcaacaacgtcaagttctgtttccataccacgtgattcttcgatagtgataacaccgtcgttgccaactttttccatagcttctgaaatgtattcaccaactttttcagaacgtgatgaaaccgcagcgacttgagcaatcgcttctttattagcaactggttgagcaatggcttttaattcgtcaactgcaacagcgacagctgattcgataccacgacggataccaattgggtttgcacccgcagtaacgtttttaagaccttcacgaacgatagcttgtgtcaatactgtggcagttgtcgtaccgtcaccagcgatgtcgtttgtttttgaagcaacttctgatacaagtttagctcccatattttcaaaatggtcttctaattcgatttctttggcgattgtcacaccatcatttgtgataagtggtgaaccaaatgatttttcaagaaccacattacgacctttagggcctaaggttactttaacggtatctgccaaaatatccacaccacgcatcatgcttgcacgtgcatctgctgaaaatttaatatcttttgccatgattagtttcctctattttatttctattgataaattttctaaataaacgttaatagcacaatctctcttatgctagaatagccaaaatatctgcttcacgaacgatagttactgtgttatcgtcgtctttgacttcaattccaacaccattttcaataatgactttatcacctgctgcaacacttggcgctactagttcacctgtcaaggtacgagcaccgtcaccgactgctacaacagttgctacttgagttctttctttgcttgcgccagcaaggacaaaaccaccaactgtttgctctttttcttcttcgactttcaagaccacacggtcacccaatggttttaacatgcttttgcctccaattatctcttaatttttgtttgaaaatagcagagctaaattcttttttagcactctaatacatcgagtgctaattcctacaaaatctattctaacacttggtcagaaatagtcaagaaaaaaacactaattctcaaaaaaagaaaactgagctgaaatcgttcctatggtggaagcaattttgctcagttaatctatatcaccccagcactagggcgtcgtcatttagggcttgaccgctatttttgtggaagaggtccatgagttgagcaacggtgaggtttttcttttcatcaccgcgaacgtcaaccacgattttgccatgataaagcatgataagacggttaccatactcgatagcgtgttccatattatgggtaatcattaaagttgttagctcttgttcttcaacgatttttttcgttaaatgcataaccatgtcacttgtttttgggtcaagggctgctgtgtgttcatctaagagaagaattttggggcgcaccaaggttgccatggcaagcgttagtgcttgacgttgccctcctgataagaaagccgcatctgttttcatacggttttccagtcctaaaccaagctctgtcaatgtttctttgaacaattcacgttcttgttcggtgacagattttttgaagaagctgcgctttttaccacgacggtaagcaatcgccatattttcttcaatcgttaaattggttgctgttcccattcgtgggtcttggaatacacggctaatatcttttgaacgtgcggcaacagaagctttacgaatagattctccttccagaagaatgtctccttcgtcaatgtcaacgacgccagcaatggaattcataagtgttgatttcccagcaccatttcctccaatgacagagatgaaatcaccttgttcaatgtctaaatctaagccacgcaaaacgtgattttcgttaacagttcctttttcaaaggttttatgaatatttgataatgttaaaagtgccattaatcttcacctcctggagttaatgtttttgagggtttgatatgaagtttgttgcgaatttctggaacatagagaatcaaggcaagcagaatcgctgacgctaatttgagcatttgcgcatcgacattcatggctagaatgataacaagcaccagacgatataagattgaaccaaggacaattgaccagagacgtttgccaagtggcaagtatttcacgataacttcagcaaggataatagatgccaaaccattaacaatcgtacctgttcccatattcatatccgcgtagccattattttgcgccaaaagtgaaccagcaagggcaatcaaaccatttgaaatcatgtaacccaaaatcttcatgcggtcaaccttaataccattagcttcacccatagcaatattatcacctgttgcacgaagcgcgagaccgacttgcgtatttaacagaaccaccagcaagataatgactaatgcgacaaagataacaccaatcaaaatcacagcatatagtttcgacaagttaagtgctgacgtcattaaggtcacgagtgtttcttgacctgctaacgaaacattggcactacctagcaccaaaagattgatagaataaagtgccgtaagagtaataatccctgttaacagagctggaattttcatcttggtgtgcatgaaaccagacaccgcaccagcaatcattcctgccacaaaaccaccaatagtagcaattaagggattaataccattgacaatcataatcgctgttgaagctgccccgagtgggaatgagccttcggcagaaaggtcagcaatatctaaaatacggaaagtaataaagacaccaattgccatgattgaccacaaaagaccttgtgaaattgccgataaaacaatatcaagccaaccgttcgtacttgatgaatctgacgtttgtgttgacgtgcttgatgaacttgttttcgttgtgcttgagcttgctgatgtgcttgtttcggtcgtatcagaagacgattctgtcgtgtcgttctcaatactacttaaatcaattcctaaagtctcagccatttcatcattggtaacgacgtttagtgtctctgggtattccgcagcaacatcactaacatcttcaccttcaaggatacgaatggctaattttgccgtttgacgaccaagggcttcgtaattagcaccgtacgtaaagaggacaccttgttccacaacatctgctgaaccaccgacaactggaatttttgtttctttcgataattctgtaatgagcgagatagcactaacaatcatattatccgttgggataaatagaacttctgtctggctcatcaggcttttagcggtatcttggacatcattcgttgatgagatacctttggtaatgacctcgatacctgccttagcaaacgcttcttttgcttcttcaacttgaacttcggaattgcgttcatttgtcgtgtacatgatgccaacttttttcacattcggcatgactttttgcaataattcgacctgttttgaaataggcgacatgtcacttgtccctgttgcaatgcccccaggtttttccattgaatcaactaattttgctgatactggatcggtaactgctgtaaacaagactggaacgtcggttgatagattagccaaggtctgtgcggctggtgttgcaatccctaaaacaaggtcattattagcaatcaaattggttgaaatggtttgtaaatttgactggtcaccttgtgcattttcataatcaatgacgatattatccccgtcaacgtagccttctttttttaattcatccacaaatcccttgcgagctgctgttagcgattgatgttcaacatactgaagaatcccaatatggacaacatcgtcgctagtgctttttgatgatgaacacccaaataacgtgagtacagctaacatcaaagccataatagctgccatgtttcttttcatactacttacctctgcttttcttacttccaatcttgatgtcgagattggaaaacttttttcactattagaactgcttagttctacatcagccacaataaataaaaccagctaggctcaaaagtctaactggttttcaatacatgcgtaaaaacatatcttacttgccaattagaactcaaagtatctaatcggcttttctcaacagtaaaatgctttagcttcatagatacaaacggtatgacgtttgcatccatgattggctacaaacgtctatctaaagaaactaaagtaatagtaatgatttagtttttcagtcattacagacgcctttttcagcatatttcctcctgttaagttgtaaactatgagacattcacatggcttaccgtcattgtttttgattgtttacagtttacccttatttttgctttctgtcaatatatttttaaaattcagaaaaagaggttgatttcgacgtgctatttcactcactaaaaataatggcatctgcgtaatctatgccaaattttgataaatcataaattgttttctcttgcgtatccacagagtatttcactaattgttcattaaataaaaagtaataatctgaatctgtctgtgtgaaaaagacttctaacatgcctgaagcaatttctgggaaagtaagttgggtctgagagagcgtttctaagtcaataattgtccaagtgtaatcagcaacgtagagtgggtcatgaagaactagcaattgatgacgagcctcgtcataataaatgaattttgggtattcaagctcggtttcaatacgactggtttcaccacttgcaaggtcatagacaagaatatgttgcccaccatctggctcgccgtcctcacgaatcccctctttagcggctgttatataaatttttccgtctgcttcaaccattcggaaataaccaccctcggtatagttaaggtcaattttttcttggacttctaattgcttattcatcacccatagataattagcattagtcgctgtctcattatccacggcaccaacaaggacataaagagtatctccaacaaaaatcatgtcattggtgaggttcattagaccgtcctctttaattgattttttggtaacttgatgtaggtcggtatcgtatttataaaaatcagtatgtcctaagaaaacggcagttgtgtaaatatactcttcatcactagccgagccatagatgtcattaccaccaacctctgtcaatttaccttttaacgttttaggttctacatcgaataaatactttttaaatgaattcggtgattcgtgagttttaccatataaatttcctttgacagattgtaggcgttcttgccaaataccaatatttttatcaaataattgtcgtgtttcaactttttcaagctgattattatcagttttaaatgtcgttatctgattaccatacgaaattgctaaatcatacgcttttgctggctcactgttagccttactctgacaacccgataatcctaaagcacccattgctaataaaattagccaagatttctttttcattatgatgtcctatttctatagataacttgtgtcttactatttattaattcaaacggatgaatagctgttccccatgctgctgttccaatatctactcctgtggtatccttatatgccgcccaaacaagctgtgaacaataaaagctacttctagtattaatattagtaaatgatctattatacggtttgccaatttgcttggctgcccactgtgcagcttttctgtcttgtgctactgtagttgacttcacacccacttgaactattgtatttcctgaaaaacgagctgcactttcccagcttccatacttaggctgaacaccatctgcaggattagcttcaattacactatcatagtatggtgctgcagctacaataccagcatgaccgttattaaatagagggctcttagcatatgaatctgtaatacaaatgactccatctctccacgaccaagttccaaactttttaccattgatgcctgaaatagtagcaccattttcttccttatcagaaacaattggtgcctcttctagcctatcaagtgcttcactttcccattgttgaatctgttgtggagtaaataaatcactttcactcgtcacatcatcattcgcaaaacctattgttgaacagcttaaacaaagtaaacttgaacttagaatgaataattttttcataatattcctcctcataatcctatttaaaattaatcttacaagtacttgtaaagccaatatatcaaaaaaaattagtcttttttaattttcgcaaattagataatttttactgtttcgttttctaattcaataatttatagtctcatgctcattcaatgatataatatcactaataaaaaaatgaggaggtttagatatggaagaaaatatttggagactattggaatttatttttaattttccaaatgcttgagacaaaaaagatttggacaacaagactagtctgaatctttttttgtccactgattaaaattcaactcaaatgattccgataattcaacacaaccgagaattcgtatagcttggatatgttgcataattcgttctttatctttttcatcagattcttgataatctaaataaagcttgaaaaaatttaatgttgcatattcaaataaatctgagtagcgtaaaccattttctagctcagcaataaaaaatttaatataaaataattcatccctactgattaaaaccgcaataagatttactaatgtacttctatattgtttaatgtaactatccaattttctaaatctctgacttctctcacaacatacctttcctaaaaaaaccaaatccaaagtgttataaagtgaagttgttgccccaaatacataaagttcatatgcagtccaattttctatgctataaaaatactgagtcaatcgttcaatttctgaaaatggaatttcataatccttttctatagccctaatattgttttttatgataattctctcaataaaatcataaatcgtaatctctttatctgttcctttcaagagttctttaaaaccttccacatcttgtgagataaatttagtaaaaagtttatttgcaaaaacagttaaacggcttggctgataatcatccattgcgtgtgcaaattcggcaaagttcatatttaagccagaaattgccaataaaaatctatctgcagacaacatagattgtcctcgttcaaattttgaaagttgtgaaacagtaagacttttagtagcaatatccttaagtttaagtcccctcgccagacgtagctctttgtaaaattctcccattttttcattcttattcacatgatatctcctttgttattttccctctttttaatatgtcacaactcaatacaagttcctataagtataattacattcctttcttgtcatatcctaaaataggtatatatttattgtcaatagtttacctttattctttctactctgtcaatatatttttaaaaaattcagaaaaatttaccacaaaaaaagtctctagcaaagagattatgtactagaaactttttatttttttgaataagtattgtaatgagattaaaaaggtatttttaaaggagtttagtttatatttaaaaggattggagtttcatttcaaaatcatcaatgagtttggcgacattttgtttgccacggtaaatgccgtagccaaaaagcaacatcccaaaaacaccgacaaaagctagaacgtagccaagtatagataaaatgaggttggtttgacgaaagaaatatattagcaaaaatccgatacttgctattaagaagagcaaggttagccaacgtccgagattttcaatcatatgtttttggtaggctatttctgtttgatagccattaatcacttctgattttgtcatgaatttttcctcttttgatcgatatgatacgcaagaaatccctagtgaggttggtatttctaaagcgtattagtaagacaaacctggatcgaagaatccaacgagaacaccaacaaaggcaataacaacgagtaatagcatgactttaattggtgagatatttttcttagccattagccaccagcaaaagacgatgaagattgctgttagcaaacctggataaacggcgtctaatttatcttgaagaaccaagtatggatttttggcactaccaagttggaatgatgtttggacagatacccaagtggcagcaacaccaccgacaaccataccaccaacgatagaaacggctttacgaatggcttgaccttgagcaccaactagaaattcaacagctttatcaccgagttcataacctttgaaataggcaaatctcatacccagataagctaacaagttccaaacgacaatgtagaaaacagcaccgattggtgagccaccagtggaaagaccaagggcaatccctaaaataactggaatcaaagttccaacaacaagtgagtcaccgataccagccacaggtcccataagccctgcacgaagtccgttaatggtttcgtcatcaacttcttcagaaccattagcacgcgcttcttcaagacctgctgtgattccgacaatgagtgaaccaagctgaggttctgtattgaagaaagctgtataagtttgcattgaacgcgcttggtcttctttattgtcatacaattcttccacgattgggagcattgatgtcaaataaccaaaggtttgcatatgctcttgtgagaagcaagtaaggttaccataataccaatgatggaaagatttcatcaaagttttctttgttaatttcttttgagccattttagatatcctcctcatcatcgtcatcaaaatcatcagctgctgtggctgttgcttttacagttttagccatttcaagttcgtagaataatacggcaaagattaatgaaatcactgcacatgataccaaattcaaaccaagtgaagctgccaaagtgaagccaacaaagaatggaataaagtcagtcactttttcaacaatttgtttcaaaagaatggcaattccgacacatggtaacaaagcccctactgtaaagagggttttcattggaataccatccattggaagtgcatctttcattgctgtaacagcagtcgcaccaagtttacacattaccaatgttgggataaatgagaatacaaaatgtgatacccatggatagagccagtcaacttgataaagttttctaaattgacctttttctaccgcacgccaaccaatgtgttgccaaacaaggttcatggttgctgttccgtagaaaagaaccgtaccgacagtaccaacaagcgtacccattgatttagccaagttagccgcatcagctgaatcagctgataaaccttgagaatggatggctaccattgccaaaggaataccgatataagacaccgcacgcacgtcggctgaaaccgtaccaccaggtgttacaagggcaatgtaaaccaactgcatagcaacaccgcagatgattcctgttttaacatcgccaagaataagtccacagacaagaccaccgacaagaggacgaccaagcgtatagttaccaatggttgtaccaccaagccctggcattgaagacaaacatgcaaacaaccctaacaaagctgcttgaaaccaagaaattgtcataatacatctcctatactaagatacaaagagcgttaagcgagcaaaggcaaaataggagtttggacgaagaggcgctagactctaggagaaactatctttttgacacagctcgcagctcgtgttcaattaacaagatacaaagagcgcaaacgagttttggtatcaaaaatagctatactcactttattcgctgctaagtaacaataaattaataaccaaattttgatttgaaatctgaccagtaaccgattgaaacatctggcaataattggaatttcactttgtatccagctttttcaattgcttcaagggcatctgcttcttcttgggtgatagattgattattcccaagtttgacagcacctggtcggtcattacatggaccaacgataatttcttttacatcactaggaacaaaaccttggtcaaccagaatttttttcatgtcaattggattcttggtaatcacaaaatagcgcgtgtcagaatccaatactttttgagatttttgtccaaaagcatctaccgaccaaacaaaggttttcttgtccgaagctcctttgtaagcttgggttaaaactttgttttttgaagcagcatcgtttacggcaatcaaaccgtcacaagggtattcttttgcccaacgtgttacagtttgcccatgaatcatgcggtcatcaatacgtacaaatgatacagtcatttttatctccttttttaaatatcatcgtcatcatcatctgaagtgattttgaattcttgaagagccgcttgagcttctggcaaaacggcttgtacaaaatcatcgccctcaagcatatctttcatcactgcagaagtaattgccattggtaaattcataccacctaaaacaacagcattttccaattttctgagttcgtccaagacattacaagcagttgtcaaagggctaccgccaataatatcagcaagaacaacaacggaatcgtcagctgttaaacctgaaatagcttgtctgaagtctttttcaaagtcatcaactgttttgccattttttagaccgacagcgatgacttggtcaattttgtcttccgcaaacatcgccaaagacgtttttagacccgtcgcaaagtctccatgactgactagtagtaaatacttcatagaacttatctccttatctgtcttttattttaaccttaaataaagcgttttcacactctcgtttgtcactttcttttgatgacaattatcacctcgaatatgacatttgtcattttgaaagcaaacaaaaacatctggggatcaaactctccagatgtcatcaagattatttcaaactgtcttctattgtcttttggattgtaaacaaatctgtctcgatactgttattggcaatggatttggtaatcaaatagtctgcttgttccagtacggtattatacgttttaaacgttggctgggtaattccctgactaagcattgaatccaatgttgaaaccgtcaaagaatctgaaccaaaaccatcctcttttagtttttctttcgtggcgtcgctttgcatcacacttttcaaaacagatgctccttgcgaataatcaaagactgattgttgaatgtcctcatcggtacagagtaattgcaaaaattcccacgccaaggtacggtgtttggtttttgaggacatggcataaagcgatgttgcgacttgcgttgcatcgccgtcctcactacttgctggcattgtcacacaagaccatgagaagctagaatatttcgcaacatgataaggataaggtttataagtgcgatattctgccaaagtcattggcaaaaaagcaacctttccttcgtcaaaatcttgtgaagtaacctcataatttccactaagggcattgagttgcgtaatcaaggaaagggcatttttcacgtcatcactgtcaaaataagctttcgttcccgttgtgttaaatagctttgcaccataggcagcgacagcttgttgccaagtgtagcctgtacagccatactggtcaatcaccccatcaccgtcagtatccttggtcacttgcttgcaaatattgtaaaagtcctctaaagtccacccagaatctggaatcgaaattccctctttttccaaaaggtcaatattaatacacatcatggttggattgctttcaaatggcaaagcgtactgcgtattattgtaatttcctgccttataagaggattcataaaatatcgaatcatcaaagctcgtactaatatgctcatccaacttagcaagtgcacctgttgatgacaagaggttaaagtcatcttctggcacgataaaaacatctggctgtgttcctgcaacaatctggtctgttaaccaatcagaataatcatcctttgaaataccactctcatagaccacctcgacatttgggtgcaatttttcaaagcgtgaaatcgcagtgtcaatgactttataatcatttccattcggcacatcccagctacttcctgcataaatgccgatttttaaaatgattttctggtgtgtttgatgataaataaaagcagcactcccaacgacaattactagtagcggtagcagtaaccatttgtaatattttttgagtttagtcatggtcatcttcctcaaatgatttcaaggtgacacctgtctgcaccgcccaaatagcaagctgcgtacggtcacgcaaattcaacttagaaagaatgttagatagataatttctaacggttccttccgacagatacagtttggcagcaatttctttattggacaatccaaaaccaatctgctgtataatgcgccactccattttactaatatcagtcgttagcgcatcatcaacttggatagcaaagtttgattgcgccatttgtgaaaaaagtttaaaaacttttgtggcaatatctggatttaacatggcacgtccgtcattaaccgtcaccaccgcatcatgcaattcatccatcgaagttcccttcagcaaataaccactggcaccatattttagagcgctataaataaaatcatcatcatcaaaagtcgttaggataatcaccttcgtatttgggaaatgttctttaacagctttagtacacaaaacaccgtccatttttggcatacgaatatccattaaaatcacgtctggtttgctagttggtagagcttccaaaacctctgtcccatcactcaccgcgccaacaacttcgatatcaggataggcagacaagacaatttttaacgactctctaatcaattcttggtcgtctgcaattaatactcgtatcattcttcttctccttttattttagggatatgaatcgttgtggcaaaaccatcctcacctgaaaattggacacgaccaccaataatggctaaacgttccgtcatttgggtcaacccaaaaccgtattgaatcgtttcgctccccactccattatctttaatgagcaaaacgtaatcatcttcatttagcatactaatcttaatttcagttgctcgtccatgacgcaaagaattggtcacagattcttgaatgacacggaaaatgacatcttcttttgttttgtcaaaatcaacattgtcccactgataattcaaatcaatctgcaaatgcgataattcttgatactcggcaagcattttttcaatagcgtcttttaaactgcggttttccagagcacctggacgcattttattcagcgagcgcctaacatcaacaatcccttctcgcacaacgttggaaacattggtcaattgctttttagcgttatttgggtcaaggtcaatcaagacaatcaccgcatcaattcccgcagaaatgcctgtcaaggcatgaccaatagtatcgtgaatttcacgcgcaatacgcctgcgttccctatcctcagtaattttttcagacaccgccacgtattctttcaaacgcgtatttgcctgcgaagccatgagcaattcttcctcaatcttatggttttcagtcaccgaataaacaatgtaagtcactaaagaaataatgaaaatgataatatttagcgataccagacaatttttgatgaaaagaatcactaaacgcgtgcttgcagggaaaaatccgatataaacatccaaatcgggcgttctaatcagaagcgacaagacatcataatttgacagcaaaagcgcaccgaaactagcgacaataaagagcaaccatgactttttctcacgaaacgtgtaaaaatccgtgtaagagaaaaagatatccataaaaacaagcaaaattaaaccgttataggaaaattgcagcgctacaaaggtagctaacaacaagagcacctcaaaaatcgcaaaccaatcacgcgccgttgtcccttttttaaacttttgatttctgatataaataacaagtaaaagccctgcaaaaaagagatttgacaaccaaaaaattcgctctggtgaacttggaatgacgctaatttcttctaataaggaacgactcaaaccattgtcaataatgtactttgtagctgacaaataaactgagctataaaataacaccgccaagaaattaataataatcagggcacgttttgcaaaatcaatatttttcaaagctttcatcattgccaccccgctaaatcaaagtcagaaacgttctcactagtcataaattcaactggaatgacaatttccttatctactgatttgttgtgatatagcgagtaacccgcctgaatcgctcgtttaccgattgttaacggcgattgagctactgttgcttgaattgaactcgtcgttgccaataaatttttcatatctggcgaaccatctacaccatagattttaatcgatgttgtcacatttgaattttcaattgcagccaaagctccgatagccacttggtcattaagcgccatcaccgtgtcaaattcgacctctgaagcgatgaccgattccacttgcggcatcgctatttcggtttgccctaggcaatccttgcggtcaaccacttgataggcatcatttccttcaatcgtatctaaaaatccattgatacgatctactgctgatactgcattttgatgttccaataacaaaattttggcacttgactgcgtctgcattaaattttgagcgcataaaacaccagcttgataattatccgatacaatcgtcgtatctactgaagaatcatctgatagttgactatcgacaacaacaatttttatcccagctcttttcgctttcttcaaagcttttattaatttttgactgtttgcatcaacaggattgatgataatgatattaacacccttttcaataaacgattcaacctgttgcgtttgtttatcaacgtccaaagcagggtctctagtgtacaaaatatcattattttcctcaacaattttttcaacctcgttgtttaataccttgtaaaaatcattgttcatggtcatgtaggtcgcaccaatcttaacctgattttcatttgaaggaaccattttatagttccaataaaccccaacaatggcaagaaccccaataaaagcgcttatcaaaacaccgatatatttccgttttttcatctcataccttttcaataaaacaaagagaccactgatagctatattcgccttaattataacacgtttaaattatacggacaattcagtcagagataagccctcattctattctaacgaattttaaaaacacccgcaggtgttttttatactctatttattcgaaactacttatgccaagtttttccagaactaaggcaataccgtcatgattgtgactagctgttacgtgtccgacttgctccttgacttcttgaggcgcatttgccataacataagcttcacctactgcctctagcatgtctaaatcgttaaaattgtcaccaaaagcaagcgtgtctgccatatcaacctcgtaatgctgcgccaaagtctgaactgcctttcctttatgaatcccacttgccataatttcaatataataaggcagcgaccttgcaattgataaatctgaatagagactttttagcttattttccaaagcttccatgcgttctggttcacccattaacaagattttatgaacttctggcaatcgaccgatttgttccaagttcgcttccttagaggctaagcccaccacgcgctcttcacgtgaaatccaacgattagcacgattttgtgacaaccacttttcaccgctgtaaacattccaagcaacatcagagacttctttttctaaatactgacaaatcgcttgcgcttcttgtggactcatcggacagctatcaatcacttgcccttgttcaccttggatgagggcaccattataggaaatcatgggtacatcaggtaaaaaatctttcaaaattggcttaatcgcctctggcatacgcgccgaaactggaacaaataaaatacctgtatcaacagcatgacaaagggcttggcgtgtcctaggcgtcactttcaaggcatcattaataagagtgccgtcaatatcactaaaaattatttttaccattgtacttttcctcctattttctctcagtatagcattttttgaaaagggtttcaaaaactatttcctgataataacaaaaaaagcccaagtcaaaaactaactcgagcttgggttggttaaaatggtaattcttcctcttccaaaactaaatcagcgaggtcgtttgccacattattttctcgcatggcacgttgggcacggctttctaaaagttggaaagaatggcaaagcacttctgtcacataattcgtgtggccttctttttcatatttgcgtgtgcgaagctcgccatcaatcgaaatcagacttccttttccagcataagaaacaagtgtttctgccaaacgtccccaaaccacaactgaaataaaatcagcctcacgctcaccattttgcgatttaaaacggcggttgactgctagtgttacacgtgtaacaaatttctcatttgacgtcgtcacaagctcaggctgcgccgtcaaacgaccaatcataataactttattgtacatcattacctccttatcttattattcgaaaaagaagttgttaatctacttgaaaaatgaaattttcaaacaattctgctaaaataaaatcaatttttacagataggagattttatgacagtcaatattaatgcctataaggaaatgctaaatcagccttggggaaaaatcatgtaccgtttgatttttgtgcagctcagccatatcaaaaacaagcaagttttagacttcggtgctggttttgggacaacctcacaatacttatcacaaaataataccgttactgccgtcgaaccaaatgccgatatgctttttgccgacgatacacaggcattcactaaaattaatggtagtttagaagttctaaaaaacttaccagaacaagcctttgatgtcatcatttgtcacaatgtctttgagtacattgataaatctctccaccaaaaataccttggtgaatttgaacgtctgttaaagccaaatggtgaactgtctttgattaaacacaacctcactggaaaagtgttacatcaggttatttttaacaataacatcgaggatgctcttcatcttttagaaggaaaagatagctacaatagctcatcattcggacatggtgaaacttacagtattgacgaattaaccagcaaaactaacttaacacttgaaaattatcaaggtctgcgcaccttttatgccctccaaccaaacgcttttaaaacagaagaagggtggctagaacgcctaacagaaattgaattagctgtggctaaccaagaaccttacaaagatatcgctttcttgcaacaccttaccttctacaagcattaaatacaacacataaattaaaaacagagactcacaaatacgtgaatctctgtttttcttaactaagaatttctctcaagctctttttcttaccctttccagtgtttttctggattaaaggcttcgccgactagggctgtgtcatcaagttcgatgataccacgtttttgtggggcatttggaagggctaattcgcgaggtgagcacatcataccaaagctcttttcgccacgaagggcacctgggaaaataagacttccgtttggcatcatagcacctggaagggctacgattgtcttcaaaccaacagcggcatttggcgcacctgcaacgatttgaacggttttatcatctgagatttgcacttggcaaatgttcaaatggtcgctgtctgggtgagcaaccatttctttgatttgaccaacaacaaattttggtgaagggtcattttccaattgttcgctaaaaccttcttttgtcaattcagcgttcaatgttgcaacgtcttggtcagatagagtaacttgaccaacaccttcaattgtaaccaagcttgacacttcaaaaatattccaagcaactgtttcaccatttttctcaaggaaaacgcgtgagacattgcctttgcgttcatagtcaagtttagcacctttgctatctttgacaattaccatgaggacatcaccgacatgttctttgttgtacgtaaaaatcattttctctcctatttcaatccagctaaaaagctgttaatttctgctttggttttgcgtaatttattaactaaacgaccaatttcttttccattttcagtcactacaaaacttggaatcccaaaaatattccaacgttgtgctacttccataaaatcatcacgatccacacggacaaaggtgaattctggattttctgcttcaatttcaggcatgactggatagatgaattggcagtctgggcaccaatttgccgtaaaaaagaaaaccactttttcaggtttttctagataggtagccatttcttcataggattttgggctaatcatttttctcctcctcatagctaatctcaccattttggtaaataaattgaaacgtccgaccgtcctctaaaacaagaccaccagtcgttctctccttatcagattcaaaagcattcacataaagcaccgagatattgtcaaatcgactaaaataatcacgaatggcttgcttaatcttttcttgtcgcttttcttcgcgttgtttttttaggattgttcccaaaatgatgacaccaccaactcccactagactaaaacgtgacagtaagtttctttttttgtttctcatacgctttattttagcatatttcctagcagatttccaaagaacatgacataggattttgagtcgaaatgctgcagttaccattactaagacatctgacctagcagtcacagtaggtgattgctaccacttcagcacttatataagcactaagattaaacaaatctacttggttaagattgagactgtcagactttcacagaatatgatataatgcagtcacgtagaaacaattacgacaaagctagccactggttcagactatcggatttcgtagcatcgttatggtagagggattctcagttagtgtcttgtttgcctttgactgaaggctaagaagaacgccaaccaacaaactgttactcaatgtcaatctgaagttgtcatagttgctactgataatgcttaccaaaggctatagttacaggatacaagaagcacaaggagaacgcatgtttattaaacaagagcaagcatcagatattactgctgttgatcaggttatcaaaaaagcatttgcatccctaccttattctgatcatcaagaacatttacttgtccgacgactacgtcaaagcaaagaattcattcccgaattatctttagttgccgagcttgacggtcagatagtcggtcatatcttattcaccaaagcacaggtcaatcatactactgtcctagctttagctcccctcgctgtccatcccgattatcaacagcaagggattggatccgccctagttaagaaagggcatcaattagcgcaagctctacagtttccttatagtattgtcttaggtgaccctcaatattactcaagatttggctatcaagcagcaaaaaactggggcattctccctcccttcgatgttccgagcaatcattttatggggattaaattgattcaatcagctcctccgttgcatggcacattagcctattctgaggcatttggagtttaaatcagaaaataactattcatttacgaaagaatcgaggtttttatgtcagaattattttcaaaaataaaagaaatcacagaacttgatagtattgcaggatacgagcatagcgttcgtaactatcttcgttcaaaaatcacaccgctcgttgatgacgtgcaaactgacggtcttggtggtatttttggtattaaaaactctgctgctgaaaatgcaccacgcatcatggttgccgctcacatggacgaagtgggtttcatggtcagcgacatcaaagctgacggtaccatgcgtgctgttggtattggtgggtggaatcctttggtgctaagctcacaacgttttactctttacacacgtgacggtcgcgccattccagtcgtttctggttctgttccaccgcatttccttcgtggagcaaatggctctgctgctcttccaaaaatcgatgacatcattttcgacgctggatttacagacaaagctgaagcagaatcatttggcattcttccaggcgacatcatcgtaccaaaatctgaaacaattctcacagccaaccaaaaaaatgttatctctaaagcttgggacaatcgcttcggtgtgcttatggtaaccgaattgcttgaaagccttaaagggcaaaaacttgataacactcttattgctggtgctaacgttcaagaagaagttggtcttcgtggcgcacacgtttctgccacaaaattccaaccagaactcttcttcgccgttgattgctcacctgctggtgacatttatggcaaccaaggtaaaattggcgacggaacacttttccgtttctacgacccaggacatatcatgttaaaagatatgcgtgatttcttactcacaaccgctgaagaagctggtatcaaatatcaatattatgctgccaaaggtggtacagatgctggtgctgctcaccttaaaaacggtggtatcccatcgacaactatcggtgtttgtgcgcgttacattcattcacaccaaagcctttatgctatggatgacttcttgcaagcgcaagctttccttcaagctattgttaaaaaattagaccgctcaactgttgacctcatcaaaaaatactagaaaggagctaggggactcaggtcattaagcagctctgttgcacttcccctttgtcttactatgaaaattggatttatcggagttggaaaaatggcaactgccattatcaacggactcaacacaacatcgcacgatatcatcatttcgggatcttcacttcctcgctcacgcgaaattgcagagcagcttgaagttgaagcagctctttcacaccaagaactcattgaccaatctgatttggttatccttggtatcaaaccacaaatgtttgaaccagtccttgctggacttcacttccatcaacccattctttcaatggcagcaggggtaacattagaacgccttggcaaattaacagacccaaatcttccattaattcgtatcatgccaaacctcaatgctcaaattctaaaaagcacaacagcgatttgtaccaatgacaacgtttctgcagaactcctagtaaccgccaaagaaatcactgacagctttggttcaacctttgatattcctgaaaaagactttgatacttttacagctcttgcaggctctagcccagcttacatttacctatttatcgaagctcttgccaaagctggtgtcaaatacggtattccaaaagaaaaatcactcgatatcgtgacacaaacggtccttgctagtgccgaaaatcttcttcaaggttctgacagtccacatgatttgattgataaaatctcaagccctggcggaacaaccatcgcaggacttctcgaccttgaaaaaacaggattgacagcaagtgtcatctcaagcatcgatgccactatcgataaagcaaaagctttgtaaattttaaaaaacgcctctacggcgcttcaaacaaaagacaaacctcttttcttgaggtttgtctttttatgcgtctaagagcaaaggcaattccaaaattcacaagtattacttgcagcccacctctattgtatccctactaaaatgtcatgttgttgtatccaattcccattcttctttaagcttattttccaaataagtatctccaattaagttagcaaataaaatagcattggagtaagatttttgtgccgctaaaaaatcttttttaaattgtaaataatatttccactcaactaaacttaaaactggacgtctttgaaaatcatgaacacttgtcatgatagtgtcactttttataataattcgtttcataaaagattctctatggaatcgtaaaaccaaatctacattatttaacaaaacattatttaaaatcaaagaagtttctggtgaaagattttcttgatttagtaaacgctccattaattcatcatacaaatctaagctatagattcccacaaacgatttagcagaagcaaggcaagcaaaatataaatctattaaaatcaaatcattaatttgaaagttcttctttcgtctaacttggtcaaaataatcatttaaaattccttcaccaaaattaacatcatcactaaaatgaacatcaatcttcgattgtaaacaatcaataattaagcgttcttcttcaggtataacttcatagtatttttctgaaatttcatcaaaatatgaagtttgtctcttaagacgttccttatccccataagttggtgttcgtaatagtaaatattttaactccttataccgagtgggaagttctaaatttttaccatcagttaactcaccaatagttactcctaatacttttgcaatatatcccaccttattaagagttgggacggattgtcctttt

SEQ ID NO: 217 - DNA, 5475 bp, Streptococcus gallolyticus
  source 1..5475: mol_type = genomic DNA
ctgttttttcatgagcctagaaattgaaaagcgaattaagtccagtggactgttttttctcgagcctaaaaactaaaaagcgagtctagtccagtggactgttttttctcgagcttagaaactaaaaaagcgagttaagtccagtggacgttttacattgtctaacatacgcaccaaattcaatttatcaatatcatcattttaaacacgaaaacaatttaaaccgtcggcaaatcattctactgcttaataacacagtgctagttaaaaccggaatttatttctaggcgagaatataacaaaagagttctggaatcactccagaacccttttgtttcactcatatttatgaacaataattatttttcgtttgcgtgactagcaatgatttctagctcaccatcaaattcccatgacttaacgtcattaggaaggataaagtggtcaccttttttgatgttataaacacggttgtcaactttcaagctaccttgacctgaaagaacacttaccaacaagtatggtgctgtttgtgtaaggttaacgacaccagataccacccatttataaacagcaaagaattcatttgaaaccaaaaggcttgaactcaagttgtcaacatcaaccgttacaggtgtactgttagcaggttcaccaattgttaaaacatcaattgattgctcaatgtgcaaatcacgaagattgccttgtgcatcacggcggtcaaaatcataaacacggtaagttgtatcacttgattgttgtgtttctaaaattaagatccctttaccaatagcgtgcattgtaccacttggtacgtagaagaaatcaccagctttaacagggatttttgttaacaaatcatcccatttcccagcttcaatcaattgacgaagctcttcttttgatttggcattgtgtccgtaaataatttcagaatcttcatccgcagcaataacataccagcactcagttttaccaagttcgccttcatgttcaagagcgtaagcatcatctgggtgaacttgtacactaagccaatcattggcatcaagaatttttgtcaataatggaaagacttcagattttggattgccaaacagttctttgtgttcacgataaagtttatctagaccttcacctttataagtaccattatctacgattgaaacaccatttggatgagctgaaattgcccagtattcaccagttgtttctgttggaatatcataaccaaattcatcacgaagtttagttccaccccagattttatcatgcatttgtgactttagaaataatggttctgccataaaaattttcctttccttcaagcaaaatatgcttgttcaccaagaagaaacccaaagcatttttgggtttcttagttaaatgttcttaacatccaataatgaataacctctagtatcgaaacgatttctactacgagagtattcaatcggtctcccattttccaagtaaacaacttgttcaacttgcaaaataggatcatcatctttgcaggctaaataatctttgtcataatgatctggcttttcagccgtgatatgtcggtaggaacctgcaaatttgagaccgagttgatgccaaaggtaatcataaacagatgttaataagatatcatcatccaaaccaggcgctaaatcgcaagacatatgagtatgttccaaagcgtaaggtttaccgtctaataaacgaagtcggataattttgtaaacaggtgtcgctgaatcaacttgaagccgctctgctattttagcatctggaaactcgacattaaattcaatgattttactcgtcaatttccgagggtcatctttcatatcatagctcaacccattgtagttgttcaaacggaattttgagtcctctttatcccaaaacgaagaatttaaaacctttgttccatttccttgttttgaaagaaccaaaccttcgatggttaacatctcaatagcttttttgattgtcatacggcttaccccaaattcttttgctaagtccgattgaatcggtaacattgaatcaatagggtaagtgccgtctgaaatcctcgttcgaataatacctgcaatctcttcatattttgacatagatcgctcctactctacttgtatagactattttttaaaaactatagttctattataacgcagaatcaggttgtttgtctagcatacgcaagaatggataccaaatgaatccgacgatgagacagtcaacgatttggagaagtccacctgcaagtgagtttgtggcaatcataccactaaagaatactggtacagtccatggcactgatacacctgttggagcaggtacaagaccaattgccattacgaaatagttaagagctgtaacgatgattggggcaataacccaaggaataagaattgtagcgttcaacacgattggcaaaccaaagataacaggttcgttaacgttgaagataccagcacctaatgccaaacgaccaacatcacgatattgttgtttcttcaagaagaatgccatgatgataacaactgccaaagtcatacctgaaccacctaaaccaacagtaaatgtttccatgaatggtttagtaatgatgtgtggaaggtgttcaccagctttgtaagcttccaagttttcaaacatcaaagtgttccaaactgggtccataactgagttaacaaggatttgtccgtgaagtccgaagaaccataggaattggatgaagaaaattgcaatcaatgttgcccaaatactacttcccaaaccaacaagtggaacttggataacattgtagataacgtcgtgaaggtttgtattgaaaccaactgttacaatagcattgatagctgtgaaaactgacaatgtcaagatagctgggataagcgctgcgaatgatttagcaactgcaggtggaacactatctggcattttaatttgccaaccttttttgcttgcgcggctataaatttctgctgcaaggaaagcaacaatcataccaaggaacattcctttggcaccgagacgatcaagacttaaaacacttgaaacttcttcaccactgtcggtagttgtgaagaatggtgttaagataaggaaacttgcaaatgagatagccccaccgaagattccttcaacgtcataagattttgataggtaataaccaataccaaaggttacaaacactgtcatgatagacattgtggcactttgaccactacccataatgtcgtataaaagcgatttcaaatcatcgcttaaaaaaggaaggttacaaataaccacgacaattgacccaaacatagtcaatggaaacgctaacatgaaagcgtctcgtaaaatagataggtaacggttagaacctaacttatttgccaaaggcaaaagtttgtcactgatagcatctagaaacttgttcataaacactcctctttccattaatttgtttttacattataactatatattattttttgttaaatgtctagtcttttttttataaaaatattgtctttttgtacaaaaagtgtataattgtatttgtaaatgaaaatattttaaggagaatctaatggcaacttacacattcccagagaacttttggtggggtgctgctacatcaggtcctcaaagtgaagggcgtttcaataagaaacatgctaatatgtttgactattggtatgaaattgaacctgaagtcttttacgatcaagtaggtcctgacacagcctcaaacttctataacagttataaagaagatattgcattgatgaaaaaagtaggactcaatagtgttcgtacttctattcaatggacacgtcttattgacgaccttgaaacaaatactgttaatcaagatgcagtagatttctataataacgttattgattgcttcatcgaaaatggtattcgtccaatcatgaaccttcaccatttcgatttacctgttgaactttatcataaatatggtggttgggaatcacgccatgttgttgatctttacgttggatttgccgaacaagctttcaaagcattcggtgaccgtgttaaagattggacaacacacaatgaaccaatggttgttgttgacggtgaatacctttaccaattccactatccaaaattagtcgatggtaagaaagcggttcaagttgcatataacttgaatattgcttcagcaaaagctatcgctaaattccgagaacttggtttagacaaagatggtggtcgcattggtactgtattgaacttaacaccaacttacgctgcttctgattctgaagatgaccaagctgcagcacactttgctgaactttggaacaacaaaatgttccttgaaccagctatcaacggacacttcccagaagaacttgaagctgttttagaaaaagatggtgttatctggcaaacagaacctgaagatgctgaaatctttaaaaataacactgttgatttcttgggtgttaacttctaccatccaaatcgtgtgaaagctccagacatcgcacctaactctgttggtgcttggttgccaagtcgttactacgacgagtacaatatgcctggtcgtcgcatgaatattgataaaggttgggaaatctacccagaagctatttacgatattgctatcaacattcgcgacaactacaaaaacatcccttggtttgtttctgaaaatggtatgggtgtttctcgtgaagaacgcttcatggatgaaagcggacaagttcaagatgattatcgtattgacttcatcaaagaacacctcgcttgtctccaccgaggaatcgaagaaggttcaaactgtttcggttatcacctctggacaccaatcgattgctggtcttggatgaatgcttaccgtaaccgttatggattcatttcaaacaatattcacacacaaattaaaaccatcaaaaaatctggtgaatggtttaaacaagttactgttgataatggatttgaagactaatcatttaatattctaataatattcgattttcaaatactcctaataaatttctacttcatgattttcacctagccagtgaaaattaacttaacaaatcctttttatccatttaaaactatttactagattctaaccctcttctgcataggaagagggttttgctatacacaattttttataagcgtagccaaataatttagtttttcaaaaacaaacctcaaattttattgaccttgcttgattttaagattagtgatgagaaaaggcgagcataaattatttgatgttgttagagcctcagactgaacagagaagaatcaaaaaagaagaccttgaagtcttctttttgaatgattaaatcgcaactttaaaatgttttcgtgtttaaaatgatgatattgataaattgaatttggtgcgtatgttagacaatggaaaacgtccactggaccttaactcgcttttcagtttctaggctcatgaaaaaacag

SEQ ID NO: 218 - DNA, 146 bp, Streptococcus gallolyticus
  source 1..146: mol_type = genomic DNA
aaatatatacttttttgctgataggagattaagttggaaaagtttgggattaaagtacgtgcattaagagaggaaaagggaatttcacgtgaggaattctgtggtgatgaaacagaattgtctgtgagacagctagctagaattga
